(19) United States
(12) Patent Application Publication
(10) Pub. No.: US 2023/0374549 A1
(43) Pub. Date: Nov. 23, 2023

(54) COMPOSITIONS AND METHODS FOR INHIBITING THE EXPRESSION OF MULTIPLE GENES

(71) Applicant: FLAGSHIP PIONEERING INNOVATIONS V, INC., Cambridge, MA (US)

(72) Inventors: Lauren Marie BEECH, Plymouth, MA (US); Jesse Jerome SMITH, Waltham, MA (US); Rahul KARNIK, Cambridge, MA (US); Kendrick Alan GOSS, Lexington, MA (US); Adam Walter SCHEIDEGGER, Somerville, MA (US); Jodi Michelle KENNEDY, Dedham, MA (US); Jeremiah Dale FARELLI, Marblehead, MA (US); Houda BELAGHZAL, Cambridge, MA (US); Laura Anh NGUYEN, Medford, MA (US); Charles W. O'DONNELL, Winchester, MA (US)

(21) Appl. No.: 18/028,975

(22) PCT Filed: Sep. 29, 2021
(86) PCT No.: PCT/US2021/052720

§ 371 Date: Mar. 28, 2023

Related U.S. Application Data
(60) Provisional application No. 63/085,013, filed on Sep. 29, 2020.
(60) Provisional application No. 63/216,487, filed on Jun. 29, 2021.

(51) Int. Cl. C12N 15/90; C12N 9/22; C12N 15/11; C12N 9/10; C12N 9/80; A61P 37/06; A61K 35/12; A61K 38/46; A61K 31/7088; C07K 14/47

(52) U.S. Cl. CPC C12N 15/907; C12N 9/22; C12N 15/11; C12N 9/1007; C12Y 201/01043; C12N 9/80; C12Y 305/01098; A61P 37/06; A61K 35/12; A61K 38/465; A61K 31/7088; C07K 14/4703; C12Y 201/01037; C12Y 201/01072; C12N 2310/20; A61K 2035/122; C07K 2319/00

(57) ABSTRACT

The present disclosure relates to site-specific disrupting agents for modulating, e.g., decreasing, expression of a target plurality of genes in a cell. In some embodiments, the target plurality of genes comprises pro-inflammatory genes, e.g., CXCL1, CXCL2, CXCL3, CXCL4, CXCL5, CXCL6, CXCL7, and IL-8. In some embodiments, the method comprises using a first site-specific disrupting agent that targets a first anchor sequence and a second site-specific disrupting agents that disrupts a second anchor sequence.

### CROSS-REFERENCE TO RELATED APPLICATIONS

[0001] The present application claims the benefit of U.S. provisional applications 63/085,013 filed Sep. 29, 2020, and 63/216,487 filed Jun. 29, 2021. The contents of the aforementioned applications are hereby incorporated by reference in their entirety.

### SEQUENCE LISTING

[0002] The instant application contains a Sequence Listing which has been submitted electronically in ASCII format and is hereby incorporated by reference in its entirety. Said ASCII copy, created on Sep. 29, 2021, is named 02057-7021WO_SL.txt and is 666,818 bytes in size.

### BACKGROUND

[0003] Mis-regulation of gene expression is the underlying cause of many diseases (e.g., in mammals, e.g., humans). A number of diseases and conditions are associated with pluralities of related genes. There is a need for novel tools, systems, and methods to alter, e.g., decrease, expression of pluralities of associated genes.

### SUMMARY

[0004] The disclosure provides, among other things, site-specific disrupting agents or systems comprising site-specific disrupting agents that may be used to modulate, e.g., decrease, expression of a plurality of target genes, e.g., a first gene and a second gene, that are within an anchor sequence-mediated conjunction (ASMC) comprising a first anchor sequence and a second anchor sequence. In one aspect, a site-specific disrupting agent comprises a targeting moiety that binds specifically to a first anchor sequence or proximal to the first anchor sequence in an ASMC. In some embodiments, binding of the site-specific disrupting agent occurs in an amount sufficient to modulate, e.g., decrease, expression of the plurality of target genes, e.g., the first gene and second gene. In some embodiments, the site-specific disrupting agent further comprises an effector moiety. Generally, modulation of expression of a target plurality of genes by a site-specific disrupting agent involves the binding of the site-specific disrupting agent to or proximal to the first anchor sequence. In some embodiments, binding of the site-specific disrupting agent to the first anchor sequence may disrupt binding of a nucleating polypeptide, e.g., CTCF, to the first anchor sequence, e.g., thereby disrupting formation and/or maintenance of the ASMC, e.g., and thereby modulating, e.g., decreasing, expression of the plurality of genes. In some embodiments, binding of the site-specific disrupting agent to or proximal to the first anchor sequence may localize a functionality of an effector moiety to the first anchor sequence and/or ASMC, e.g., thereby disrupting formation and/or maintenance of the ASMC, e.g., and thereby modulating, e.g., decreasing, expression of the plurality of genes. In some embodiments, binding of the site-specific disrupting agent to or proximal to the first anchor sequence may localize a functionality of an effector moiety to the first anchor sequence and/or ASMC, e.g., thereby modulating, e.g., decreasing, expression of the plurality of genes. Without wishing to be bound by theory, in some embodiments it is thought that targeting a plurality of genes that are within the same ASMC may more effectively modulate, e.g., decrease, expression of the plurality of genes and/or more effectively achieve a therapeutic effect relating to the functionality of the plurality of genes. For example, in some embodiments a targeted plurality of genes may all be pro-inflammatory genes; targeting the plurality of pro-inflammatory genes for modulation, e.g., reduction, in expression as taught herein may more effectively decrease inflammation than targeting individual genes. Targeting a plurality of genes comprised within the same genomic complex, e.g., ASMC, (e.g., by targeting the ASMC or an anchor sequence of the ASMC) may have an additive or synergistic effect (e.g., with regard to expression modulation or stability/duration of modulation) that is greater than the effect of targeting individual genes of the plurality.

[0005] In some aspects, the disclosure provides a method of decreasing expression of a first gene and a second gene in a cell, comprising: contacting the cell with a site-specific disrupting agent comprising a targeting moiety that binds specifically to a first anchor sequence or a site proximal to a first anchor sequence, in an amount sufficient to decrease expression of the first and second genes, the first and second genes being within an anchor sequence-mediated conjunction that comprises the first anchor sequence and a second anchor sequence. In some embodiments, the first gene and the second gene are proinflammatory genes.

[0006] In some aspects, the disclosure is directed to a site-specific disrupting agent, comprising: a DNA-binding, e.g., a targeting moiety that binds specifically to or proximal to a first anchor sequence within a cell. In some embodiments, the first anchor sequence is part of an anchor sequence-mediated conjunction that further comprises a second anchor sequence, a first gene, and a second gene. In some embodiments, the first gene and the second gene are proinflammatory genes.

[0007] In some aspects, the disclosure is directed to a site-specific disrupting agent, comprising: a targeting moiety that binds specifically to or proximal to a first anchor sequence within a cell, wherein the first anchor sequence is part of an anchor sequence-mediated conjunction that further comprises a second anchor sequence, a first gene, and a second gene, wherein the first gene and the second gene are proinflammatory genes.

[0008] In another aspect, the disclosure provides a system comprising a first site-specific disrupting agent comprising a first targeting moiety and optionally a first effector moiety, wherein the first site-specific disrupting agent binds specifically to a first anchor sequence (or proximal to the first anchor sequence) of an anchor sequence mediated conjunction (ASMC), comprising a first gene and a second gene, and a second site-specific disrupting agent comprising a second targeting moiety and optionally a second effector moiety, wherein the second site-specific disrupting agent binds to a second anchor sequence (or proximal to the second anchor sequence) of the ASMC.

[0009] In another aspect, the disclosure is directed to a method of decreasing expression of a first gene and a second gene in a cell, comprising: contacting the cell with a site-specific disrupting agent that comprises a targeting moiety that binds specifically to a first anchor sequence or a site proximal to a first anchor sequence, in an amount sufficient to decrease expression of the first and second genes, the first and second genes being within an anchor sequence-mediated conjunction that comprises the first anchor sequence and a second anchor sequence, wherein the first gene and the second gene are proinflammatory genes; thereby decreasing expression of the first and second genes.

[0010] In another aspect, the disclosure is directed to a method of decreasing expression of a first gene and a second gene in a cell, comprising:
[0011] contacting the cell with a system comprising a first site-specific disrupting agent comprising a first targeting moiety and optionally a first effector moiety that binds specifically to a first anchor sequence or a site proximal to a first anchor sequence and a second site-specific disrupting agent comprising a second targeting moiety and optionally a second effector moiety wherein the second site-specific disrupting agent binds to a second anchor sequence (or proximal to the second anchor sequence) of the ASMC, in an amount sufficient to decrease expression of the first and second genes, the first and second genes being within the ASMC, wherein the first gene and the second gene are proinflammatory genes.

[0012] In another aspect, the disclosure is directed to a reaction mixture comprising a cell (e.g., a human cell, e.g., a primary human cell) and a site-specific disrupting agent or a system as described herein.

[0013] In another aspect, the disclosure is directed to a method of treating a subject having an inflammatory disorder, comprising administering to the subject a site-specific disrupting agent or a system as described herein in an amount sufficient to treat the inflammatory disorder.

[0014] In another aspect, the disclosure is directed to a method of treating inflammation, e.g., local inflammation, in a subject having an infection, e.g., viral infection, e.g., COVID-19, comprising, administering to the subject a site-specific disrupting agent or a system as described herein in an amount sufficient to treat the inflammation.

[0015] In another aspect, the disclosure is directed to a human cell having decreased expression of a first gene and a second gene, wherein the first gene and the second gene are proinflammatory genes, wherein the cell comprises a disrupted (e.g., fully disrupted) anchor sequence-mediated conjunction that comprises the first and second genes. In some embodiments, the human cell was previously contacted with a site-specific disrupting agent or system described herein. In some embodiments, the human cell no longer comprises a site-specific disrupting agent or system described herein.

[0016] In another aspect, the disclosure is directed to a human cell comprising a mutation at genomic coordinates chr4:74595464-74595486, chr4:74595457-74595479, chr4:74595460-74595482, chr4:74595472-74595494, chr4:75000088-75000110, chr4:75000091-75000113, chr4:75000085-75000107, chr4:75000157-75000179, chr4:75000156-75000178, chr4:74595215-74595237, chr4:74595370-74595392, chr4:74595560-74595582, chr4:74595642-74595664, chr4:74595787-74595809, chr4:74528428-74528450, chr4:74528567-74528589, chr4:74528609-74528631, chr4:74789132-74789154, chr4:74789250-74789272, chr4:74789312-74789334, chr4:74964853-74964875, chr4:74964906-74964928, chr4:74965538-74965560, chr4:74965737-74965759, chr4:75000031-75000053, chr4:75000115-75000137, chr4:75000231-75000253, chr4:74975146-74975168, chr4:74975369-74975391, chr4:74976318-74976340, chr4:74570348-74570370, chr4:74570503-74570525, or chr4:74570526-74570548, or within 5, 10, 15, 20, 30, 40, or 50 nucleotides of said region.

[0017] Those skilled in the art will recognize or be able to ascertain using no more than routine experimentation, many equivalents to the specific embodiments of the disclosure described herein.

[0018] All publications, patent applications, patents, and other references (e.g., sequence database reference numbers) mentioned herein are incorporated by reference in their entirety. For example, all GenBank, Unigene, and Entrez sequences referred to herein, e.g., in any Table herein, are incorporated by reference. Unless otherwise specified, the sequence accession numbers specified herein, including in any Table herein, refer to the database entries current as of Sep. 29, 2020. When one gene or protein references a plurality of sequence accession numbers, all of the sequence variants are encompassed.

### Definitions

[0019] Anchor Sequence: The term “anchor sequence” as used herein, refers to a nucleic acid sequence recognized by a nucleating agent that binds sufficiently to form an anchor sequence-mediated conjunction, e.g., a complex. In some embodiments, an anchor sequence comprises one or more CTCF binding motifs. In some embodiments, an anchor sequence is not located within a gene coding region. In some embodiments, an anchor sequence is located within an intergenic region. In some embodiments, an anchor sequence is not located within either of an enhancer or a promoter. In some embodiments, an anchor sequence is located at least 400 bp, at least 450 bp, at least 500 bp, at least 550 bp, at least 600 bp, at least 650 bp, at least 700 bp, at least 750 bp, at least 800 bp, at least 850 bp, at least 900 bp, at least 950 bp, or at least 1 kb away from any transcription start site. In some embodiments, an anchor sequence is located within a region that is not associated with genomic imprinting, monoallelic expression, and/or monoallelic epigenetic marks. In some embodiments, the anchor sequence has one or more functions selected from binding an endogenous nucleating polypeptide (e.g., CTCF), interacting with a second anchor sequence to form an anchor sequence mediated conjunction, or insulating against an enhancer that is outside the anchor sequence mediated conjunction. In some embodiments of the present disclosure, technologies are provided that may specifically target a particular anchor sequence or anchor sequences, without targeting other anchor sequences (e.g., sequences that may contain a nucleating agent (e.g., CTCF) binding motif in a different context); such targeted anchor sequences may be referred to as the “target anchor sequence”. In some embodiments, sequence and/or activity of a target anchor sequence is modulated while sequence and/or activity of one or more other anchor sequences that may be present in the same system (e.g., in the same cell and/or in some embodiments on the same nucleic acid molecule—e.g., the same chromosome) as the targeted anchor sequence is not modulated. In some embodiments, the anchor sequence comprises or is a nucleating polypeptide binding motif. In some embodiments, the anchor sequence is adjacent to a nucleating polypeptide binding motif.

[0020] Anchor Sequence-Mediated Conjunction: The term “anchor sequence-mediated conjunction” as used herein, refers to a DNA structure, in some cases, a complex, that occurs and/or is maintained via physical interaction or binding of at least two anchor sequences in the DNA by one or more polypeptides, such as nucleating polypeptides, or one or more proteins and/or a nucleic acid entity (such as RNA or DNA), that bind the anchor sequences to enable spatial proximity and functional linkage between the anchor sequences (see, e.g. FIG. 1).

[0021] Associated with: Two events or entities are “associated” with one another, as that term is used herein, if presence, level, form and/or function of one is correlated with that of the other. For example, in some embodiments, a particular entity (e.g., polypeptide, genetic signature, metabolite, microbe, etc.) is considered to be associated with a particular disease, disorder, or condition, if its presence, level, form and/or function correlates with incidence of and/or susceptibility to the disease, disorder, or condition (e.g., across a relevant population). In some embodiments, two or more entities are physically “associated” with one another if they interact, directly or indirectly, so that they are and/or remain in physical proximity with one another. In some embodiments, two or more entities that are physically associated with one another are covalently linked to one another; in some embodiments, two or more entities that are physically associated with one another are not covalently linked to one another but are non-covalently associated, for example by means of hydrogen bonds, van der Waals interaction, hydrophobic interactions, magnetism, and combinations thereof. In some embodiments, a DNA sequence is “associated with” a target genomic or transcription complex when the nucleic acid is at least partially within the target genomic or transcription complex, and expression of a gene in the DNA sequence is affected by formation or disruption of the target genomic or transcription complex.

[0022] Site-specific disrupting agent: As used herein, the term “site-specific disrupting agent” refers to an agent or entity that specifically inhibits, dissociates, degrades, and/or modifies one or more components of a genomic complex, e.g., ASMC, thereby modulating, e.g., decreasing, expression of a target plurality of genes as described herein. In some embodiments, a site-specific disrupting agent interacts with one or more components of a genomic complex. In some embodiments, a site-specific disrupting agent binds (e.g., directly or, in some embodiments, indirectly) to one or more genomic complex components. In some embodiments, a site-specific disrupting agent binds to an anchor sequence, e.g., a first and/or second anchor sequence, that may be part of an ASMC comprising a target plurality of genes. In some embodiments, a site-specific disrupting agent binds to a site proximal to an anchor sequence, e.g., a first and/or second anchor sequence, that may be part of an ASMC comprising a target plurality of genes. In some embodiments, a site-specific disrupting agent modifies one or more genomic complex components. In some embodiments, a site-specific disrupting agent comprises an oligonucleotide. In some embodiments, a site-specific disrupting agent comprises a polypeptide. In some embodiments, a site-specific disrupting agent comprises an antibody (e.g., a monospecific or multi-specific antibody construct) or antibody fragment. In some embodiments, a site-specific disrupting agent is directed to a particular genomic location and/or to a genomic complex by a targeting moiety, as described herein. In some embodiments, a site-specific disrupting agent comprises a genomic complex component or variant thereof. In some embodiments, a site-specific disrupting agent comprises a targeting moiety. In some embodiments, a site-specific disrupting agent comprises an effector moiety. In some embodiments, a site-specific disrupting agent comprises a plurality of effector moieties. In some embodiments, a site-specific disrupting agent comprises a targeting moiety and one or more effector moieties. In some embodiments, the site-specific disrupting agent specifically binds a first site in the genome with higher affinity than a second site in the genome (e.g., relative to any other site in the genome). In some embodiments, the site-specific disrupting agent preferentially inhibits, dissociates, degrades, and/or modifies one or more components of a first genomic complex relative to a second genomic complex (e.g., relative to any other genomic complex).

[0023] Domain: As used herein, the term “domain” refers to a section or portion of an entity. In some embodiments, a “domain” is associated with a particular structural and/or functional feature of the entity so that, when the domain is physically separated from the rest of its parent entity, it substantially or entirely retains the particular structural and/or functional feature. Alternatively, or additionally, in some embodiments, a domain may be or include a portion of an entity that, when separated from that (parent) entity and linked with a different (recipient) entity, substantially retains and/or imparts on the recipient entity one or more structural and/or functional features that characterized it in the parent entity. In some embodiments, a domain is or comprises a section or portion of a molecule (e.g., a small molecule, carbohydrate, lipid, nucleic acid, polypeptide, etc.). In some embodiments, a domain is or comprises a section of a polypeptide. In some such embodiments, a domain is characterized by a particular structural element (e.g., a particular amino acid sequence or sequence motif, alpha-helix character, beta-sheet character, coiled-coil character, random coil character, etc.), and/or by a particular functional feature (e.g., binding activity, enzymatic activity, folding activity, signaling activity, etc.).

[0024] Effector moiety: As used herein, the term “effector moiety” refers to a domain with one or more functionalities that modulate, e.g., decrease, expression of a target plurality of genes in a cell when appropriately localized in the nucleus of a cell. In some embodiments, an effector moiety comprises a polypeptide. In some embodiments, an effector moiety comprises a polypeptide and a nucleic acid. A functionality associated with an effector moiety may directly affect expression of a target plurality of genes, e.g., blocking recruitment of a transcription factor that would stimulate expression of the gene. A functionality associated with an effector moiety may indirectly affect expression of a target plurality of genes, e.g., introducing epigenetic modifications or recruiting other factors that introduce epigenetic modifications that induce a change in chromosomal topology that inhibits expression of a target plurality of genes.

[0025] Genomic complex: As used herein, the term “genomic complex” is a complex that brings together two genomic sequence elements that are spaced apart from one another on one or more chromosomes, via interactions between and among a plurality of protein and/or other components (potentially including, the genomic sequence elements). In some embodiments, the genomic sequence elements are anchor sequences to which one or more protein components of the complex binds. In some embodiments, a genomic complex may comprise an anchor sequence-mediated conjunction. In some embodiments, a genomic sequence element may be or comprise a CTCF binding motif, a promoter and/or an enhancer. In some embodiments, a genomic sequence element includes at least one or both of a promoter and/or regulatory site (e.g., an enhancer). In some embodiments, complex formation is nucleated at the genomic sequence element(s) and/or by binding of one or more of the protein component(s) to the genomic sequence element(s). As will be understood by those skilled in the art, in some embodiments, co-localization (e.g., conjunction) of the genomic sites via formation of the complex alters DNA topology at or near the genomic sequence element(s), including, in some embodiments, between them. In some embodiments, a genomic complex comprises an anchor sequence-mediated conjunction, which comprises one or more loops. In some embodiments, a genomic complex as described herein is nucleated by a nucleating polypeptide such as, for example, CTCF and/or Cohesin. In some embodiments, a genomic complex as described herein may include, for example, one or more of CTCF, Cohesin, non-coding RNA (e.g., eRNA), transcriptional machinery proteins (e.g., RNA polymerase, one or more transcription factors, for example selected from the group consisting of TFIIA, TFIIB, TFIID, TFIIE, TFIIF, TFIIH, etc.), transcriptional regulators (e.g., Mediator, P300, enhancer-binding proteins, repressor-binding proteins, histone modifiers, etc.), etc. In some embodiments, a genomic complex as described herein includes one or more polypeptide components and/or one or more nucleic acid components (e.g., one or more RNA components), which may, in some embodiments, be interacting with one another and/or with one or more genomic sequence elements (e.g., anchor sequences, promoter sequences, regulatory sequences (e.g., enhancer sequences)) so as to constrain a stretch of genomic DNA into a topological configuration (e.g., a loop) that it does not adopt when the complex is not formed.

[0026] Nucleic acid: As used herein, in its broadest sense, the term “nucleic acid” refers to any compound and/or substance that is or can be incorporated into an oligonucleotide chain. In some embodiments, a nucleic acid is a compound and/or substance that is or can be incorporated into an oligonucleotide chain via a phosphodiester linkage. As will be clear from context, in some embodiments, “nucleic acid” refers to an individual nucleic acid residue (e.g., a nucleotide and/or nucleoside); in some embodiments, “nucleic acid” refers to an oligonucleotide chain comprising individual nucleic acid residues. In some embodiments, a “nucleic acid” is or comprises RNA; in some embodiments, a “nucleic acid” is or comprises DNA. In some embodiments, a nucleic acid is, comprises, or consists of one or more natural nucleic acid residues. In some embodiments, a nucleic acid is, comprises, or consists of one or more nucleic acid analogs. In some embodiments, a nucleic acid analog differs from a nucleic acid in that it does not utilize a phosphodiester backbone. For example, in some embodiments, a nucleic acid is, comprises, or consists of one or more “peptide nucleic acids”, which are known in the art and have peptide bonds instead of phosphodiester bonds in the backbone, are considered within the scope of the present invention. Alternatively, or additionally, in some embodiments, a nucleic acid has one or more phosphorothioate and/or 5′-N-phosphoramidite linkages rather than phosphodiester bonds. In some embodiments, a nucleic acid is, comprises, or consists of one or more natural nucleosides (e.g., adenosine, thymidine, guanosine, cytidine, uridine, deoxyadenosine, deoxythymidine, deoxy guanosine, and deoxycytidine). In some embodiments, a nucleic acid is, comprises, or consists of one or more nucleoside analogs (e.g., 2-aminoadenosine, 2-thiothymidine, inosine, pyrrolo-pyrimidine, 3-methyl adenosine, 5-methylcytidine, C-5 propynyl-cytidine, C-5 propynyl-uridine, 2-aminoadenosine, C5-bromouridine, C5-fluorouridine, C5-iodouridine, C5-propynyl-uridine, C5-propynyl-cytidine, C5-methylcytidine, 2-aminoadenosine, 7-deazaadenosine, 7-deazaguanosine, 8-oxoadenosine, 8-oxoguanosine, 0(6)-methylguanine, 2-thiocytidine, methylated bases, intercalated bases, and combinations thereof). In some embodiments, a nucleic acid comprises one or more modified sugars (e.g., 2′-fluororibose, ribose, 2′-deoxyribose, arabinose, and hexose) as compared with those in natural nucleic acids. In some embodiments, a nucleic acid has a nucleotide sequence that encodes a functional gene product such as an RNA or protein. In some embodiments, a nucleic acid includes one or more introns. In some embodiments, nucleic acids are prepared by one or more of isolation from a natural source, enzymatic synthesis by polymerization based on a complementary template (in vivo or in vitro), reproduction in a recombinant cell or system, and chemical synthesis. In some embodiments, a nucleic acid is at least 3, 4, 5, 6, 7, 8, 9, 10, 15, 20, 25, 30, 35, 40, 45, 50, 55, 60, 65, 70, 75, 80, 85, 90, 95, 100, 110, 120, 130, 140, 150, 160, 170, 180, 190, 20, 225, 250, 275, 300, 325, 350, 375, 400, 425, 450, 475, 500, 600, 700, 800, 900, 1000, 1500, 2000, 2500, 3000, 3500, 4000, 4500, 5000 or more residues long. In some embodiments, a nucleic acid is partly or wholly single stranded; in some embodiments, a nucleic acid is partly or wholly double stranded. In some embodiments a nucleic acid has a nucleotide sequence comprising at least one element that encodes, or is the complement of a sequence that encodes, a polypeptide. In some embodiments, a nucleic acid has enzymatic activity.

[0027] Operably linked: As used herein, the phrase “operably linked” refers to a juxtaposition wherein the components described are in a relationship permitting them to function in their intended manner. A transcription control element “operably linked” to a functional element, e.g., gene, is associated in such a way that expression and/or activity of the functional element, e.g., gene, is achieved under conditions compatible with the transcription control element. In some embodiments, “operably linked” transcription control elements are contiguous (e.g., covalently linked) with coding elements, e.g., genes, of interest; in some embodiments, operably linked transcription control elements act in trans to or otherwise at a distance from the functional element, e.g., gene, of interest. In some embodiments, operably linked means two nucleic acid sequences are comprised on the same nucleic acid molecule. In a further embodiment, operably linked may further mean that the two nucleic acid sequences are proximal to one another on the same nucleic acid molecule, e.g., within 1000, 500, 100, 50, or 10 base pairs of each other or directly adjacent to each other.

[0028] Peptide, Polypeptide, Protein: As used herein, the terms “peptide,” “polypeptide,” and “protein” refer to a compound comprised of amino acid residues covalently linked by peptide bonds, or by means other than peptide bonds. A protein or peptide must contain at least two amino acids, and no limitation is placed on the maximum number of amino acids that can comprise a protein's or peptide's sequence. Polypeptides include any peptide or protein comprising two or more amino acids joined to each other by peptide bonds or by means other than peptide bonds. As used herein, the term refers to both short chains, which also commonly are referred to in the art as peptides, oligopeptides and oligomers, for example, and to longer chains, which generally are referred to in the art as proteins, of which there are many types.

[0029] Proximal: As used herein, “proximal” refers to a closeness of two sites, e.g., nucleic acid sites, such that binding of a site-specific disrupting agent at the first site and/or modification of the first site by a site-specific disrupting agent will produce the same or substantially the same effect as binding and/or modification of the other site. For example, a DNA-targeting moiety may bind to a first site that is proximal to an anchor sequence (the second site), and the effector moiety associated with said DNA-targeting moiety may epigenetically modify the first site such that the binding of the anchor sequence to an endogenous nucleating polypeptide modified, substantially the same as if the second site (the anchor sequence) had been bound and/or modified. In some embodiments, sites that are proximal to one another are less than 5000, 4000, 3000, 2000, 1000, 900, 800, 700, 600, 500, 400, 300, 200, 100, 50, 40, 30, 20, 10, or 5 base pairs from one another.

[0030] Sequence targeting polypeptide: As used herein, the term “sequence targeting polypeptide” as used herein, refers to a protein, such as an enzyme, e.g., Cas9 or a TALEN, that recognizes or specifically binds to a target nucleic acid sequence. In some embodiments, the sequence targeting polypeptide is a catalytically inactive protein, such as dCas9, a TAL effector molecule, or a Zn Finger molecule, that lacks endonuclease activity.

[0031] Specific binding: As used herein, the term “specific binding” refers to an ability to discriminate between possible binding partners in the environment in which binding is to occur. In some embodiments, a binding agent that interacts with one particular target when other potential targets are present is said to “bind specifically” to the target with which it interacts. In some embodiments, specific binding is assessed by detecting or determining degree of association between the binding agent and its partner; in some embodiments, specific binding is assessed by detecting or determining degree of dissociation of a binding agent-partner complex. In some embodiments, specific binding is assessed by detecting or determining ability of the binding agent to compete with an alternative interaction between its partner and another entity. In some embodiments, specific binding is assessed by performing such detections or determinations across a range of concentrations.

[0032] Subject: As used herein, the term “subject” or “test subject” refers to any organism to which a provided compound or composition is administered in accordance with the present disclosure e.g., for experimental, diagnostic, prophylactic, and/or therapeutic purposes. Typical subjects include animals (e.g., mammals such as mice, rats, rabbits, non-human primates, and humans; insects; worms; etc.) and plants. In some embodiments, a subject may be suffering from, and/or susceptible to a disease, disorder, and/or condition.

[0033] Substantially: As used herein, the term “substantially” refers to the qualitative condition of exhibiting total or near-total extent or degree of a characteristic or property of interest. One of ordinary skill in the art will understand that biological and chemical phenomena rarely, if ever, go to completion and/or proceed to completeness or achieve or avoid an absolute result. The term “substantially” may therefore be used in some embodiments herein to capture potential lack of completeness inherent in many biological and chemical phenomena.

[0034] Symptoms are reduced: As used herein, the phrase “symptoms are reduced” may be used when one or more symptoms of a particular disease, disorder or condition is reduced in magnitude (e.g., intensity, severity, etc.) and/or frequency. In some embodiments, a delay in the onset of a particular symptom is considered one form of reducing the frequency of that symptom.

[0035] Target: An agent or entity is considered to “target” another agent or entity, in accordance with the present disclosure, if it binds specifically to the targeted agent or entity under conditions in which they come into contact with one another. In some embodiments, for example, an antibody (or antigen-binding fragment thereof) targets its cognate epitope or antigen. In some embodiments, a nucleic acid having a particular sequence targets a nucleic acid of substantially complementary sequence. In some embodiments, a targeting moiety that specifically binds an anchor sequence targets the anchor sequence, the ASMC comprising the anchor sequence, and/or the plurality of genes within the ASMC.

[0036] Target plurality of genes: As used herein, the term “target plurality of genes” means a group of more than one gene (e.g., 2, 3, 4, 5, 6, 7, 8, 9, or more genes) that is targeted for modulation, e.g., of expression. In some embodiments, a target plurality of genes is part of a targeted genomic complex. In some embodiments, each gene of a target plurality of genes has at least part (e.g., part or all) of its genomic sequence as part of a target genomic complex, e.g., at least partly inside an ASMC, which genomic complex is targeted by a site-specific disrupting agent as described herein. In some embodiments, modulation comprises inhibition of expression of the target plurality of genes. In some embodiments, a target plurality of genes is modulated by contacting the target plurality of genes or a transcription control element operably linked to one or more of the target plurality of genes with a site-specific disrupting agent described herein. In some embodiments, one or more of a target plurality of genes is aberrantly expressed (e.g., over-expressed) in a cell, e.g., a cell in a subject (e.g., patient). In some embodiments, the target plurality of genes has related functionalities. For example, the genes of a target plurality of genes may all have a pro-inflammatory effect when expressed; the genes of such a target plurality of genes may be referred to herein as pro-inflammatory genes or target pro-inflammatory genes. In some embodiments, a gene of a target plurality of genes encodes a protein. In some embodiments, a gene of a target plurality of genes encodes a functional RNA.

[0037] Targeting moiety: As used herein, the term “targeting moiety” means an agent or entity that specifically interacts (e.g., targets) with a component or set of components, e.g., a component or components that participate in a genomic complex as described herein (e.g., an anchor sequence-mediated conjunction). In some embodiments, a targeting moiety in accordance with the present disclosure targets one or more target component(s) of a genomic complex as described herein. In some embodiments, a targeting moiety targets a genomic complex component that comprises a genomic sequence element (e.g., an anchor sequence). In some embodiments, a targeting moiety targets a genomic complex component other than a genomic sequence element. In some embodiments, a targeting moiety targets a plurality or combination of genomic complex components, which plurality in some embodiments may include a genomic sequence element. In some aspects, contributions of the present disclosure include the insight that inhibition, dissociation, degradation, and/or modification of one or more genomic complexes, e.g., comprising a target anchor sequence proximal to a target gene (e.g., fusion gene, e.g., fusion oncogene) and/or breakpoint, as described herein, can be achieved by targeting genomic complex component(s), including genomic sequence element(s), with site-specific disrupting agents. In some aspects, effective inhibition, dissociation, degradation, and/or modification of one or more genomic complexes, as described herein, can be achieved by targeting complex component(s) comprising genomic sequence element(s). In some embodiments, the present disclosure contemplates that improved (e.g., with respect to, for example, degree of specificity for a particular genomic complex as compared with other genomic complexes that may form or be present in a given system, effectiveness of the inhibition, dissociation, degradation, or modification [e.g., in terms of impact on number of complexes detected in a population]) inhibition, dissociation, degradation, or modification may be achieved by targeting one or more complex components that is not a genomic sequence element and, optionally, may alternatively or additionally include targeting a genomic sequence element, wherein improved inhibition, dissociation, degradation, or modification is relative to that typically achieved through targeting genomic sequence element(s) alone. In some embodiments, a site-specific disrupting agent as described herein promotes inhibition, dissociation, degradation, or modification of a target genomic complex. For example, by way of non-limiting example, in some embodiments, a site-specific disrupting agent as described herein inhibits, dissociates, degrades (e.g., a component of), and/or modifies (e.g., a component of) an anchor sequence-mediated conjunction by targeting at least one component of a given genomic complex (e.g., comprising the anchor sequence-mediated conjunction). In some embodiments, a site-specific disrupting agent as described herein inhibits, dissociates, degrades (e.g., a component of), and/or modifies (e.g., a component of) a particular genomic complex (i.e., a target genomic complex) and does not inhibit, dissociate, degrade (e.g., a component of), and/or modify (e.g., a component of) at least one other particular genomic complex (i.e., a non-target genomic complex) that, for example, may be present in other cells (e.g., in non-target cells) and/or that may be present at a different site in the same cell (i.e., within a target cell). A site-specific disrupting agent as described herein may comprise a targeting moiety. In some embodiments, a targeting moiety also acts as an effector moiety (e.g., disrupting moiety); in some such embodiments a provided site-specific disrupting agent may lack any effector moiety (e.g., disrupting, modifying, or other effector moiety) separate (or meaningfully distinct) from the targeting moiety.

[0038] Therapeutically effective amount: As used herein, the term “therapeutically effective amount” means an amount of a substance (e.g., a therapeutic agent, composition, and/or formulation) that elicits a desired biological response when administered as part of a therapeutic regimen. In some embodiments, a therapeutically effective amount of a substance is an amount that is sufficient, when administered to a subject suffering from or susceptible to a disease, disorder, and/or condition, to treat, diagnose, prevent, and/or delay the onset of the disease, disorder, and/or condition. As will be appreciated by those of ordinary skill in this art, an effective amount of a substance may vary depending on such factors as desired biological endpoint(s), substance to be delivered, target cell(s) or tissue(s), etc. For example, in some embodiments, an effective amount of compound in a formulation to treat a disease, disorder, and/or condition is an amount that alleviates, ameliorates, relieves, inhibits, prevents, delays onset of, reduces severity of and/or reduces incidence of one or more symptoms or features of the disease, disorder, and/or condition. In some embodiments, a therapeutically effective amount is administered in a single dose; in some embodiments, multiple unit doses are required to deliver a therapeutically effective amount.

[0039] Transcriptional control sequence: As used herein, the term “transcriptional control sequence” refers to a nucleic acid sequence that increases or decreases transcription of a gene. An “enhancing sequence” increases the likelihood of gene transcription. A “silencing or repressor sequence” decreases the likelihood of gene transcription. Examples of transcriptional control sequences include promoters and enhancers. In some embodiments, an ASMC comprises a transcriptional control sequence. Such a transcriptional control sequence is referred to as an internal transcriptional control sequence (e.g., an enhancing sequence that is comprised within an ASMC is referred to as an internal enhancing sequence).

### BRIEF DESCRIPTION OF THE DRAWINGS

[0040] The following detailed description of the embodiments of the disclosure will be better understood when read in conjunction with the appended drawings. For the purpose of illustrating the disclosure, there are shown in the drawings embodiments, which are presently exemplified. It should be understood, however, that the disclosure is not limited to the precise arrangement and instrumentalities of the embodiments shown in the drawings.

[0041] FIG. 1 shows a diagram showing exemplary positioning of gRNA sequences in an anchor sequence. Figure discloses SEQ ID NOS 244-245, respectively, in order of appearance.

[0042] FIG. 2 shows a diagram showing exemplary positioning of gRNA sequences in an anchor sequence and restriction site information. Figure discloses SEQ ID NOS 246-247, respectively, in order of appearance.

[0043] FIG. 3 shows a graph of expression (mRNA) of various chemokines in TNF-treated cells with and without treatment with a site-specific disrupting agent comprising a CRISPR/Cas molecule and first exemplary gRNA.

[0044] FIG. 4 shows a graph of expression (mRNA) of various chemokines in TNF-treated cells with and without treatment with a site-specific disrupting agent comprising a CRISPR/Cas molecule and a second exemplary gRNA.

[0045] FIG. 5 shows a diagram depicting different types of genomic complex, e.g., ASMCs, e.g., loops, and models for how to alter expression of genes contained within.

[0046] FIG. 6 shows a graph of cytokine expression measured by RNA levels of CXCL1, CXCL2, CXCL3, and IL-8 in THP-1 cells treated with a site-specific disrupting agent comprising a CRISPR/Cas molecule and sgRNAs targeted to the anchor sequences of a genomic complex (e.g., ASMC) comprising cytokine-encoding genes.

[0047] FIG. 7 shows a graph of cytokine secretion (CXCL1 and IL-8) of THP-1 cells treated with site-specific disrupting agent comprising a CRISPR/Cas molecule and different sgRNAs targeted to the anchor sequences of a genomic complex (e.g., ASMC) comprising cytokine-encoding genes.

[0048] FIG. 8 shows a graph (top) of cytokine expression (CXCL3) measured by RNA level in THP-1 cells treated with a site-specific disrupting agent comprising a CRISPR/Cas molecule and sgRNAs targeted to the anchor sequences of a genomic complex (e.g., ASMC) comprising cytokine-encoding genes, and a flow chart (bottom) showing how cells were processed in the experiment.

[0049] FIG. 9A shows a graph (top) of cytokine expression (CXCL1) measured by RNA level in THP-1 cells 3 weeks after treatment with a site-specific disrupting agent comprising a CRISPR/Cas molecule and sgRNAs targeted to the anchor sequences of a genomic complex (e.g., ASMC) comprising cytokine-encoding genes, and a flow chart (bottom) showing how cells were processed in the experiment. FIG. 9B shows a graph of cytokine expression (CXCL3) measured by RNA level in THP-1 cells 3 weeks after treatment with a site-specific disrupting agent comprising a CRISPR/Cas molecule and sgRNAs targeted to the anchor sequences of a genomic complex (e.g., ASMC) comprising cytokine-encoding genes.

[0050] FIG. 10 shows a graph of cytokine expression (CXCL1) measured by RNA level in THP-1 cells after treatment with a site-specific disrupting agent comprising a catalytically inactive CRISPR/Cas molecule and a transcriptional repressor (KRAB) and sgRNAs targeted to the anchor sequences of a genomic complex (e.g., ASMC) comprising cytokine-encoding genes.

[0051] FIG. 11 shows a graph of cytokine expression (CXCL1) measured by RNA level in THP-1 cells after treatment with a site-specific disrupting agent comprising a catalytically inactive CRISPR/Cas molecule and a histone methyltransferase (EZH2) and sgRNAs targeted to the anchor sequences of a genomic complex (e.g., ASMC) comprising cytokine-encoding genes.

[0052] FIG. 12 shows a graph of cytokine expression (CXCL1) measured by RNA level in THP-1 cells after treatment with a site-specific disrupting agent comprising a catalytically inactive CRISPR/Cas molecule and a DNA methyltransferase (MQ1) and sgRNAs targeted to the anchor sequences of a genomic complex (e.g., ASMC) comprising cytokine-encoding genes.

[0053] FIG. 13 shows a graph (top) of cytokine expression (CXCL1) measured by RNA level in THP-1 cells after treatment with different site-specific disrupting agents for 72 hours, 3 weeks, or 4 weeks, and a flow chart (bottom) showing how cells were processed in the experiment.

[0054] FIG. 14 shows a graph (top) of cytokine expression (CXCL3) measured by RNA level in THP-1 cells after treatment with different site-specific disrupting agents and sgRNAs targeted to the anchor sequences of a genomic complex (e.g., ASMC) comprising cytokine-encoding genes, and a flow chart (bottom) showing how cells were processed in the experiment.

[0055] FIG. 15 shows a graph (top) of cytokine expression (CXCL1) measured by RNA level in THP-1 cells after treatment with different site-specific disrupting agents and sgRNAs targeted to the anchor sequences of a genomic complex (e.g., ASMC) comprising cytokine-encoding genes.

[0056] FIG. 16 shows human CXCL IGD and gene cluster organization. FIG. 16A shows a schematic Insulated Genomic Domain (IGD) illustrating the two loops within CXLC1-8 gene cluster. CXCL8, CXCL6, and CXCL 1 genes reside on the left loop of the IGD. CXCL2-5 and CXCL7 genes reside on the right loop of the IGD. Investigation of the IGD data from different cell lines suggested that middle CTCF is only present in cells that secrete CXCL (e.g., not in lymphocytes).

[0057] FIG. 16B shows guides were designed to the four different CTCF targets: Left CTCF-2, Left CTCF, Middle CTCF, and Right CTCF.

[0058] FIG. 17 shows CXCL1-8 genes were downregulated when dCas9-EZH2 guide 30183 targeted Middle CTCF motif located within the CXCL1-8 cluster in TNF-alpha treated Human A549 lung cancer epithelial cells. Cells stimulated with TNF alpha were treated as control.

[0059] FIG. 18 shows CXCL1, 2, 3, 8 genes were downregulated when dCas9-EZH2 guide 30183 targeted Middle CTCF motif located within the CXCL1-8 cluster in TNF-alpha treated Human IMR-90 normal lung fibroblast cells. Cells stimulated with TNF alpha were treated as control.

[0060] FIG. 19 shows that CXCL1, 2, 3, 8 genes were downregulated when Controller A targeted Left CTCF motif located within the CXCL1-8 cluster in TNF-alpha treated Human monocytes. Cells stimulated with TNF alpha were treated as control.

[0061] FIG. 20 shows mouse CXCL IGD and gene cluster organization. FIG. 20A shows a schematic Insulated Genomic Domain (IGD) illustrating the two loops within CXCL gene cluster. FIG. 20B illustrates the two loops within the CXLC1-5, 7 and 15 gene cluster. CXCL4, CXCL5, and CXCL7 genes reside on the left loop of the IGD. CXCL1-3 and CXCL15 genes reside on the right loop of the IGD guides were designed to the four different CTCF targets: Left (L), Middle 1 (M1), Middle 2 (M2), and Right (R) CTCF.

[0062] FIG. 21A shows IGD guides were designed to the four different CTCF targets: Middle 1 (M1), Middle 2 (M2), and Right (R) CTCF.

[0063] FIG. 21B shows in vitro downregulation of mouse CXCL IGD in Hep 1.6 using dCas9-MQ1. dCas9-MQ1 was transfected using guides targeting the right, or one of the two middle CTCF motifs in the CXCL gene cluster, which showed no down regulation in any of the seven CXCL genes after TNF alpha stimulation (orange). When dCas9-MQ1 was transfected using combination guides targeting both middle CTCF and right, the entire gene cluster was down regulated (blue).

[0064] FIG. 22A shows schematic experimental design to determine the effect of dCas9-MQ1 on decreasing leukocyte filtration in inflamed lungs. Each mouse was treated with either LNP alone or with dCas9-MQ1 at 3 mg/kg targeting the two middle and right CTCF at −2 hour time point. The mice were simulated with 5 mg/kg LPS at zero hours followed by a second dose of LNP alone or a dCas9-MQ1 at 3 mg/kg targeting the two middle and right CTCF at the +8 hour time point. Dexamethasone was administered intraperitoneal at 10 mg/kg dose at time 0, 24, and 48 hours. The animals were terminated at 72 hours and bronchiolar lavage fluid were collected from the lungs for flow staining.

[0065] FIG. 22B shows systemic administration of an dCas9-MQ1 decreased leukocyte infiltration in the inflamed lungs. Total leukocyte count/mL in the bronchiolar lavage fluid obtained from dCas9-MQ1 treated mice showed significant differences compared to LPS+disease animals.

[0066] FIG. 23A shows the composition of infiltrating cells found in the bronchiolar lavage fluid obtained from an inflamed lung of a mice. The leukocyte cell types that make up the majority of the infiltrating cells are neutrophils, followed by B cells, T cells, macrophages and other types of hematopoietic cells.

[0067] FIG. 23B shows dCas9-MQ1 decreased the count of neutrophils infiltrating the lungs with significant difference compared to the +LPS disease group.

[0068] FIG. 24 shows the decrease of leukocyte cells in the BALF was lung specific and not due to the decrease of white blood cells in the peripheral blood. This graph illustrated that the effect of decreasing leukocyte count in the BALF with the dCas9-MQ1 treatment was lung specific and was not because the mouse itself had a decrease in leukocyte population. The hematopoietic cell population in the peripheral blood was similar across all groups.

[0069] FIGS. 25A-G show CXCL1-5, CXCL7, and CXCL15 gene expression was decreased in the lung tissue. After treating the animals with LNP alone or with dCas9-MQ1, the lung tissues were processed to check for CXCL gene expression by qPCR methods. All CXCL genes show downregulation when treated with dCA9-MQ1. CXCL2 expression was most downregulated.

[0070] FIG. 26 shows decreasing CXCL expression and cellular recruitment to the site of inflammation had a beneficial downstream effect of decreasing the presence of other cytokines. The chemokine protein levels secreted in the BALF showed decrease in CXCL 1 and 2 protein levels. Decreasing CXCL expression and cellular recruitment to the site of inflammation had beneficial downstream effects of decreasing the presence of GM-CSF (FIG. 26C) and IL6 (FIG. 26D).

### DETAILED DESCRIPTION OF CERTAIN EMBODIMENTS

[0071] The present disclosure provides technologies for modulating, e.g., decreasing, expression of a target plurality of genes in a cell, e.g., in a subject or patient, through the use of site-specific disrupting agent or a system comprising two or more site-specific disrupting agents. In some embodiments, a site-specific disrupting agent comprises a targeting moiety. In some embodiments, a site-specific disrupting agent comprises a targeting moiety and an effector moiety. Without wishing to be bound by theory, a number of diseases and conditions are associated with groups of genes with related functionalities that are associated with a common genomic complex, e.g., ASMC. Modulation, e.g., disruption, of a genomic complex, e.g., ASMC, comprising (wholly or in part) a target plurality of genes may be an improved approach to altering (e.g., decreasing) expression of the target plurality of genes (e.g., with respect to improved efficiency, efficacy, and/or stability of alteration) over modulation of individual target genes. Said improvements may translate to corresponding improvements in the treatment of diseases and conditions associated with the target plurality of genes. For example, a plurality of genes may be associated with a pro-inflammatory effect and a site-specific disrupting agent can target a genomic complex, e.g., ASMC, comprising (wholly or in part) the plurality of genes to modulate, e.g., decrease, expression of the plurality of genes and thereby achieve an anti-inflammatory effect (e.g., a superior anti-inflammatory effect relative to individually targeting the genes of the plurality). Examples of site-specific disrupting agents, targeting moieties, effector moieties, and target pluralities of genes are provided herein.

[0072] A site-specific disrupting agent may modulate, e.g., decrease, expression of a target plurality of genes by one or more modalities. In some embodiments, a site-specific disrupting agent binds to a target site, e.g., anchor sequence, and physically or sterically competes for binding with other genomic complex components, e.g., a nucleating polypeptide. Without wishing to be bound by theory, physical or steric blockage of an anchor sequence, e.g., such that binding of a genomic complex component (e.g., a nucleating polypeptide) to the anchor sequence is inhibited (e.g., prevented), is one mechanism by which a site-specific disrupting agent may modulate, e.g., decrease, expression of a target plurality of genes. A site-specific disrupting agent may destabilize the interaction of a genomic complex component (e.g., nucleating polypeptide) with an anchor sequence, e.g., by altering (e.g., decreasing) the affinity and/or avidity at which the genomic complex component binds the anchor sequence. Blocking or destabilizing binding of a genomic complex component (e.g., nucleating polypeptide) to an anchor sequence may be accomplished by one or more means, including: epigenetic modification of the anchor sequence or a sequence proximal thereto, genetic modification of the anchor sequence or a sequence proximal thereto, or binding of the site-specific disrupting agent to the anchor sequence or a sequence proximal thereto. Inhibiting (e.g., preventing) binding of a genomic complex component (e.g., a nucleating polypeptide) to an anchor sequence may inhibit (e.g., disrupt or prevent formation of) a genomic complex, e.g., ASMC. Inhibition of a genomic complex, e.g., ASMC, comprising, wholly or partly, a target plurality of genes may modulate, e.g., decrease, expression of the genes of the target plurality of genes. In some embodiments, a site-specific disrupting agent comprises a targeting moiety, a first effector moiety, and a second effector moiety. In some embodiments, the first effector moiety has a sequence that is different from the sequence of the second effector moiety. In some embodiments, the first effector moiety has a sequence that is identical to the sequence of the second effector moiety.

[0073] The disclosure further provides in part, a system comprising two or more site-specific disrupting agents, each comprising a targeting moiety and optionally an effector moiety. In some embodiments, the targeting moieties target two or more different sequences (e.g., each site-specific disrupting agent may target a different sequence). In some embodiments, the first site-specific disrupting agent binds to a transcription regulatory element (e.g., a promoter or transcription start site (TSS)) operably linked to a target plurality of genes, e.g., human CXCL1-8 and the second site-specific disrupting agent binds to an anchor sequence of an anchor sequence mediated conjunction (ASMC) comprising a target plurality of genes, e.g., human CXCL1-8. In some embodiments, modulation of expression of a target plurality of genes, e.g., human CXCL 1-8 by a system involves the binding of the first site-specific disrupting agent and second site-specific disrupting agent to the first and second DNA sequences, respectively. Binding of the first and second DNA sequences localizes the functionalities of the first and second effector moieties to those sites. Without wishing to be bound by theory, in some embodiments employing the functionalities of both the first and second site-specific disrupting agent effector moieties stably represses expression of a target plurality of gene associated with or comprising the first and/or second DNA sequences, e.g., wherein the first and/or second DNA sequences are or comprise sequences of the target plurality of gene or one or more operably linked transcription control elements.

[0074] Site-Specific Disrupting Agents

[0075] In some embodiments, a site-specific disrupting agent comprises a targeting moiety. In some embodiments, the targeting moiety specifically binds a DNA sequence, e.g., an anchor sequence, and thereby modulates, e.g., disrupts, a genomic complex (e.g., ASMC) comprising said DNA sequence. In some embodiments, a site-specific disrupting agent comprises a targeting moiety and an effector moiety. In some embodiments, the targeting moiety specifically binds a DNA sequence, thereby localizing the effector moiety's functionality to the DNA sequence, thereby modulating, e.g., disrupting, a genomic complex (e.g., ASMC) comprising said DNA sequence. In some embodiments, a site-specific disrupting agent comprises one targeting moiety and one effector moiety. In some embodiments, a site-specific disrupting agent comprises one targeting moiety and more than one effector moiety, e.g., two, three, four, or five effector moieties, each of which may be the same or different from another of the more than one effector moieties. In some embodiments, a site-specific disrupting agent may comprise two effector moieties where the first effector moiety comprises a different functionality than the second effector moiety. For example, a site-specific disrupting agent may comprise two effector moieties, where the first effector moiety comprises DNA methyltransferase functionality (e.g., comprises G9A or EZH2 or a functional fragment or variant thereof) and the second effector moiety comprises a transcriptional repressor functionality (e.g., comprises KRAB or a functional fragment or variant thereof). In some embodiments, a site-specific disrupting agent comprises effector moieties whose functionalities are complementary to one another with regard to decreasing expression of a target plurality of gene, where the functionalities together inhibit expression and, optionally, do not inhibit or negligibly inhibit expression when present individually. In some embodiments, a site-specific disrupting agent comprises a plurality of effector moieties, wherein each effector moiety complements each other effector moiety, each effector moiety decreases expression of a target plurality of gene.

[0076] In some embodiments, a site-specific disrupting agent comprises a combination of effector moieties whose functionalities synergize with one another with regard to decreasing expression of a target plurality of gene. Without wishing to be bound by theory, in some embodiments, epigenetic modifications to a genomic locus are cumulative, in that multiple transcription activating epigenetic markers (e.g., multiple different types of epigenetic markers and/or more extensive marking of a given type) individually together inhibit expression more effectively than individual modifications alone (e.g., producing a greater decrease in expression and/or a longer-lasting decrease in expression). In some embodiments, a site-specific disrupting agent comprises a plurality of effector moieties, wherein each effector moiety synergizes with each other effector moiety, e.g., each effector moiety decreases expression of a target plurality of gene. In some embodiments, a site-specific disrupting agent (comprising a plurality of effector moieties which synergize with one another) is more effective at inhibiting expression of a target plurality of gene, than a site-specific disrupting agent comprising an individual effector moiety. In some embodiments, a site-specific disrupting agent comprising said plurality of effector moieties is at least 1.05× (i.e., 1.05 times), 1.1×, 1.15×, 1.2×, 1.25×, 1.3×, 1.35×, 1.4×, 1.45×, 1.5×, 1.55×, 1.6×, 1.65×, 1.7×, 1.75×, 1.8×, 1.85×, 1.9×, 1.95×, 2×, 3×, 4×, 5×, 6×, 7×, 8×, 9×, 10×, 20×, 30×, 40×, 50×, 60×, 70×, 80×, 90×, or 100× as effective at decreasing expression of a target plurality of gene, than a site-specific disrupting agent comprising an individual effector moiety.

[0077] In some embodiments, a site-specific disrupting agent comprises one or more targeting moieties e.g., a Cas domain, TAL effector domain, or Zn Finger domain. In an embodiment, when system comprises two or more targeting moieties of the same type, e.g., two or more Cas domains, the targeting moieties specifically bind two or more different sequences. For example, in a site-specific disrupting agent system comprising two or more Cas domains, the two or more Cas domains may be chosen or altered such that they only appreciably bind the gRNA corresponding to their target sequence (e.g., and do not appreciably bind the gRNA corresponding to the target of another Cas domain).

[0078] In some embodiments, a site-specific disrupting agent comprises a targeting moiety and an effector moiety that are covalently linked, e.g., by a peptide bond. In some embodiments, the targeting moiety and effector moiety are situated on the same polypeptide chain, e.g., connected by one or more peptide bonds and/or a linker. In some embodiments, a site-specific disrupting agent comprises a fusion molecule, e.g., comprising the targeting moiety and effector moiety linked by a peptide bond and/or a linker. In some embodiments, a site-specific disrupting agent comprises a targeting moiety that is disposed N-terminal of an effector moiety on the same polypeptide chain. In some embodiments, a site-specific disrupting agent comprises a targeting moiety that is disposed C-terminal of an effector moiety on the same polypeptide chain. In some embodiments, a site-specific disrupting agent comprises a targeting moiety and an effector moiety that are covalently linked by a non-peptide bond. In some embodiments, a targeting moiety is conjugated to an effector moiety by a non-peptide bond. In some embodiments, a site-specific disrupting agent comprises a targeting moiety and a plurality of effector moieties, wherein the targeting moiety and the plurality of effector moieties are covalently linked, e.g., by peptide bonds (e.g., the targeting moiety and plurality of effector moieties are all connected by a series of covalent bonds, although each individual moiety may not share a covalent bond with every other moiety).

[0079] In other embodiments, a site-specific disrupting agent comprises a targeting moiety and an effector moiety that are not covalently linked, e.g., that are non-covalently associated with one another. In some embodiments, a site-specific disrupting agent comprises a targeting moiety that non-covalently binds to an effector moiety or vice versa. In some embodiments, a site-specific disrupting agent comprises a targeting moiety and a plurality of effector moieties, wherein the targeting moiety and at least one effector moiety are not covalently linked, e.g., are non-covalently associated with one another, and wherein the targeting moiety and at least one other effector moiety are covalently linked, e.g., by a peptide bond.

[0080] In some embodiments, a site-specific disrupting agent comprises a first effector moiety comprising G9A and a second effector moiety comprising KRAB. In some embodiments, a site-specific disrupting agent comprises a first effector moiety comprising G9A and a second effector moiety comprising EZH2. In some embodiments, a site-specific disrupting agent comprises a first effector moiety comprising EZH2 and a second effector moiety comprising KRAB.

[0081] In some embodiments, a site-specific disrupting agent comprises a targeting moiety and an effector moiety, wherein the C-terminal end of the effector moiety, e.g., an effector moiety chosen from, EZH2, or G9A or a functional variant or fragment thereof and the N-terminal end of the targeting moiety are covalently linked. In some embodiments, a site-specific disrupting agent comprises a targeting moiety and an effector moiety wherein the N-terminal end of the effector moiety, e.g., an effector moiety chosen from HDAC8, MQ1, DNMT3a/3L, KRAB, or a functional variant or fragment thereof and the C-terminal end of the targeting moiety are covalently linked. In some embodiments, a site-specific disrupting agent comprises a targeting moiety, a first effector moiety and a second effector moiety, wherein, the C-terminal end of the first effector moiety, e.g., a effector moiety chosen from EZH2, G9A, or a functional variant or fragment thereof, and the N-terminal end of the targeting moiety are covalently linked and the C-terminal end of the targeting moiety and the N-terminal end of the second effector moiety, e.g., a effector moiety chosen from HDAC8, MQ1, DNMT3a/3L, KRAB or a functional variant or fragment thereof are covalently linked. The covalent linkage may be, e.g., via a linker sequence.

[0082] In some embodiments, a site-specific disrupting agent comprises a targeting moiety, a first effector moiety and a second effector moiety, wherein the first effector moiety is EZH2, or a functional variant or fragment thereof, e.g., wherein the first effector moiety comprises an amino acid sequence of SEQ ID NO: 17 or a sequence with at least 80, 85, 90, 95, 99, or 100% identity thereto, or having no more than 20, 19, 18, 17, 16, 15, 14, 13, 12, 11, 10, 9, 8, 7, 6, 5, 4, 3, 2, or 1 positions of difference thereto, and the first effector moiety is N-terminal of the targeting moiety; and the second effector moiety is KRAB, or a functional variant or fragment thereof, e.g., wherein the second effector moiety comprises an amino acid sequence of SEQ ID NO: 13 or a sequence with at least 80, 85, 90, 95, 99, or 100% identity thereto, or having no more than 20, 19, 18, 17, 16, 15, 14, 13, 12, 11, 10, 9, 8, 7, 6, 5, 4, 3, 2, or 1 positions of difference thereto, and the second effector moiety is C-terminal of the targeting moiety.

[0083] In some embodiments, a site-specific disrupting agent comprises a targeting moiety, a first effector moiety and a second effector moiety, wherein the first effector moiety is EZH2, or a functional variant or fragment thereof, e.g., wherein the first effector moiety comprises an amino acid sequence of SEQ ID NO: 17 or a sequence with at least 80, 85, 90, 95, 99, or 100% identity thereto, or having no more than 20, 19, 18, 17, 16, 15, 14, 13, 12, 11, 10, 9, 8, 7, 6, 5, 4, 3, 2, or 1 positions of difference thereto, and the first effector moiety is N-terminal of the targeting moiety; and the second effector moiety is HDAC8, or a functional variant or fragment thereof, e.g., wherein the second effector moiety comprises an amino acid sequence of SEQ ID NO: 19 or a sequence with at least 80, 85, 90, 95, 99, or 100% identity thereto, or having no more than 20, 19, 18, 17, 16, 15, 14, 13, 12, 11, 10, 9, 8, 7, 6, 5, 4, 3, 2, or 1 positions of difference thereto, and the second effector moiety is C-terminal of the targeting moiety.

[0084] In some embodiments, a site-specific disrupting agent comprises a targeting moiety, a first effector moiety and a second effector moiety, wherein the first effector moiety is G9A, or a functional variant or fragment thereof, e.g., wherein the first effector moiety comprises an amino acid sequence of SEQ ID NO: 67 or a sequence with at least 80, 85, 90, 95, 99, or 100% identity thereto, or having no more than 20, 19, 18, 17, 16, 15, 14, 13, 12, 11, 10, 9, 8, 7, 6, 5, 4, 3, 2, or 1 positions of difference thereto, and the first effector moiety is N-terminal of the targeting moiety; and the second effector moiety is KRAB, or a functional variant or fragment thereof, e.g., wherein the second effector moiety comprises an amino acid sequence of SEQ ID NO: 13 or a sequence with at least 80, 85, 90, 95, 99, or 100% identity thereto, or having no more than 20, 19, 18, 17, 16, 15, 14, 13, 12, 11, 10, 9, 8, 7, 6, 5, 4, 3, 2, or 1 positions of difference thereto, and the second effector moiety is C-terminal of the targeting moiety.

[0085] In some embodiments, a site-specific disrupting agent comprises a targeting moiety, a first effector moiety and a second effector moiety, wherein the first effector moiety is G9A, or a functional variant or fragment thereof, e.g., wherein the first effector moiety comprises an amino acid sequence of SEQ ID NO: 67 or a sequence with at least 80, 85, 90, 95, 99, or 100% identity thereto, or having no more than 20, 19, 18, 17, 16, 15, 14, 13, 12, 11, 10, 9, 8, 7, 6, 5, 4, 3, 2, or 1 positions of difference thereto, and the first effector moiety is N-terminal of the targeting moiety; and the second effector moiety is EZH2, or a functional variant or fragment thereof, e.g., wherein the second effector moiety comprises an amino acid sequence of SEQ ID NO: 17 or a sequence with at least 80, 85, 90, 95, 99, or 100% identity thereto, or having no more than 20, 19, 18, 17, 16, 15, 14, 13, 12, 11, 10, 9, 8, 7, 6, 5, 4, 3, 2, or 1 positions of difference thereto, and the second effector moiety is C-terminal of the targeting moiety.

[0086] In some embodiments, the first effector moiety comprises a histone methyltransferase activity and the second effector moiety comprises a different histone methyltransferase activity. In some embodiments, the first effector moiety comprises a histone methyltransferase activity and the second effector moiety comprises the same histone methyltransferase activity. In some embodiments, the first effector moiety comprises a histone demethylase activity and the second effector moiety comprises a histone deacetylase activity. In some embodiments, the first effector moiety comprises a histone demethylase activity and the second effector moiety comprises a DNA methyltransferase activity. In some embodiments, the first effector moiety comprises a histone demethylase activity and the second effector moiety comprises a DNA demethylase activity. In some embodiments, the first effector moiety comprises a histone demethylase activity and the second effector moiety comprises a transcription repressor activity. In some embodiments, the first effector moiety comprises a histone demethylase activity and the second effector moiety comprises a different histone demethylase activity. In some embodiments, the first effector moiety comprises a histone demethylase activity and the second effector moiety comprises the same histone demethylase activity. In some embodiments, the first effector moiety comprises a histone deacetylase activity and the second effector moiety comprises a DNA methyltransferase activity. In some embodiments, the first effector moiety comprises a histone deacetylase activity and the second effector moiety comprises a DNA demethylase activity. In some embodiments, the first effector moiety comprises a histone deacetylase activity and the second effector moiety comprises a transcription repressor activity. In some embodiments, the first effector moiety comprises a histone deacetylase activity and the second effector moiety comprises a different histone deacetylase activity. In some embodiments, the first effector moiety comprises a histone deacetylase activity and the second effector moiety comprises the same histone deacetylase activity. In some embodiments, the first effector moiety comprises a DNA methyltransferase activity and the second effector moiety comprises a DNA demethylase activity. In some embodiments, the first effector moiety comprises a DNA methyltransferase activity and the second effector moiety comprises a transcription repressor activity. In some embodiments, the first effector moiety comprises a DNA methyltransferase activity and the second effector moiety comprises a different DNA methyltransferase activity. In some embodiments, the first effector moiety comprises a DNA methyltransferase activity and the second effector moiety comprises the same DNA methyltransferase activity. In some embodiments, the first effector moiety comprises a DNA demethylase activity and the second effector moiety comprises a transcription repressor activity. In some embodiments, the first effector moiety comprises a DNA demethylase activity and the second effector moiety comprises a different DNA demethylase activity. In some embodiments, the first effector moiety comprises a DNA demethylase activity and the second effector moiety comprises the same DNA demethylase activity. In some embodiments, the first effector moiety comprises a transcription repressor activity and the second effector moiety comprises a different transcription repressor activity. In some embodiments, the first effector moiety comprises a transcription repressor activity and the second effector moiety comprises the same transcription repressor activity.

[0087] In some embodiments, the first effector moiety comprises, DNMT3a/31, MQ1, KRAB, G9A, HDAC8, or EZH2 and the second effector moiety comprises DNMT3a/31, MQ1, KRAB, G9A, HDAC8, or EZH2.

### Linkers

[0088] A site-specific disrupting agent may comprise one or more linkers. A linker may connect a targeting moiety to an effector moiety, an effector moiety to another effector moiety, or a targeting moiety to another targeting moiety. A linker may be a chemical bond, e.g., one or more covalent bonds or non-covalent bonds. In some embodiments, a linker is covalent. In some embodiments, a linker is non-covalent. In some embodiments, a linker is a peptide linker. Such a linker may be between 2-30, 5-30, 10-30, 15-30, 20-30, 25-30, 2-25, 5-25, 10-25, 15-25, 20-25, 2-20, 5-20, 10-20, 15-20, 2-15, 5-15, 10-15, 2-10, 5-10, or 2-5 amino acids in length, or greater than or equal to 2, 5, 10, 15, 20, 25, or 30 amino acids in length (and optionally up to 50, 40, 30, 25, 20, 15, 10, or 5 amino acids in length). In some embodiments, a linker can be used to space a first moiety from a second moiety, e.g., a targeting moiety from an effector moiety. In some embodiments, for example, a linker can be positioned between a targeting moiety and an effector moiety, e.g., to provide molecular flexibility of secondary and tertiary structures. In some embodiments, a site-specific disrupting agent may comprise a first effector moiety linked to the targeting moiety via a first linker and a second effector moiety linked to the targeting moiety via a second linker. In some embodiments, the first linker has a sequence that is identical to the sequence of the second linker. In some embodiments, the first linker has a sequence that is not identical to the sequence of the second linker. In some embodiments, the first effector moiety is N-terminal of the targeting moiety. In some embodiments, the C-terminal of the targeting moiety. In some embodiments, the C-terminal end of the first effector moiety is linked to the N-terminal end of the targeting moiety via the first linker and the N-terminal end of the second effector moiety is linked to the C-terminal end of the targeting moiety via the second linker.

[0089] A linker may comprise flexible, rigid, and/or cleavable linkers described herein. In some embodiments, a linker includes at least one glycine, alanine, and serine amino acids to provide for flexibility. In some embodiments, a linker is a hydrophobic linker, such as including a negatively charged sulfonate group, polyethylene glycol (PEG) group, or pyrophosphate diester group. In some embodiments, a linker is cleavable to selectively release a moiety (e.g., polypeptide) from a modulating agent, but sufficiently stable to prevent premature cleavage.

[0090] In some embodiments, one or more moieties of a site-specific disrupting agent described herein are linked with one or more linkers.

[0091] As will be known by one of skill in the art, commonly used flexible linkers have sequences consisting primarily of stretches of Gly and Ser residues (“GS” linker). Flexible linkers may be useful for joining domains/moieties that require a certain degree of movement or interaction and may include small, non-polar (e.g., Gly) or polar (e.g., Ser or Thr) amino acids. Incorporation of Ser or Thr can also maintain the stability of a linker in aqueous solutions by forming hydrogen bonds with water molecules, and therefore reduce unfavorable interactions between a linker and moieties/domains.

[0092] Rigid linkers are useful to keep a fixed distance between domains/moieties and to maintain their independent functions. Rigid linkers may also be useful when a spatial separation of domains is critical to preserve the stability or bioactivity of one or more components in the fusion. Rigid linkers may have an alpha helix-structure or Pro-rich sequence, (XP)ₙ, with X designating any amino acid, preferably Ala, Lys, or Glu.

[0093] Cleavable linkers may release free functional domains/moieties in vivo. In some embodiments, linkers may be cleaved under specific conditions, such as presence of reducing reagents or proteases. In vivo cleavable linkers may utilize reversible nature of a disulfide bond. One example includes a thrombin-sensitive sequence (e.g., PRS) between the two Cys residues. In vitro thrombin treatment of CPRSC (SEQ ID NO: 243) results in the cleavage of a thrombin-sensitive sequence, while a reversible disulfide linkage remains intact. Such linkers are known and described, e.g., in Chen et al. 2013. Fusion Protein Linkers: Property, Design and Functionality. Adv Drug Deliv Rev. 65(10): 1357-1369. In vivo cleavage of linkers in fusions may also be carried out by proteases that are expressed in vivo under certain conditions, in specific cells or tissues, or constrained within certain cellular compartments. Specificity of many proteases offers slower cleavage of the linker in constrained compartments.

[0094] Examples of molecules suitable for use in linkers described herein include a negatively charged sulfonate group; lipids, such as a poly (—CH₂—) hydrocarbon chains, such as polyethylene glycol (PEG) group, unsaturated variants thereof, hydroxylated variants thereof, amidated or otherwise N-containing variants thereof; noncarbon linkers; carbohydrate linkers; phosphodiester linkers, or other molecule capable of covalently linking two or more components of a site-specific disrupting agent. Non-covalent linkers are also included, such as hydrophobic lipid globules to which the polypeptide is linked, for example through a hydrophobic region of a polypeptide or a hydrophobic extension of a polypeptide, such as a series of residues rich in leucine, isoleucine, valine, or perhaps also alanine, phenylalanine, or even tyrosine, methionine, glycine, or other hydrophobic residue. Components of a site-specific disrupting agent may be linked using charge-based chemistry, such that a positively charged component of a site-specific disrupting agent is linked to a negative charge of another component.

### Nucleic Acids

[0095] In one aspect, the disclosure provides nucleic acid sequences encoding a site-specific disrupting agent, a system, a targeting moiety and/or an effector moiety as described herein. A skilled artisan is aware that the nucleic acid sequences of RNA are identical to the corresponding DNA sequences, except that typically thymine (T) is replaced by uracil (U). It will be understood that when a nucleotide sequence is represented by a DNA sequence (e.g., comprising, A, T, G, C), this disclosure also provides the corresponding RNA sequence (e.g., comprising, A, U, G, C) in which “U” replaces “T.” Conventional notation is used herein to describe polynucleotide sequences: the left-hand end of a single-stranded polynucleotide sequence is the 5′-end; the left-hand direction of a double-stranded polynucleotide sequence is referred to as the 5′-direction.

[0096] It will be appreciated by those skilled in the art that due to the degeneracy of the genetic code, a multitude of nucleotide sequences encoding a site-specific disrupting agent comprising DNA-targeting moiety and/or an effector moiety as described herein may be produced, some of which have similarity, e.g., 90%, 95%, 96%, 97%, 98%, or 99% identity to the nucleic acid sequences disclosed herein. For instance, codons AGA, AGG, CGA, CGC, CGG, and CGU all encode the amino acid arginine. Thus, at every position in the nucleic acid molecules of the disclosure where an arginine is specified by a codon, the codon can be altered to any of the corresponding codons described above without altering the encoded polypeptide.

[0097] In some embodiments a nucleic acid sequence encoding a site-specific disrupting agent comprising a targeting moiety and/or one or more effector moieties may be part or all of a codon-optimized coding region, optimized according to codon usage in mammals, e.g., humans. In some embodiments, a nucleic acid sequence encoding a targeting moiety and/or one or more effector moieties is codon optimized for increasing the protein expression and/or increasing the duration of protein expression. In some embodiments, a protein produced by the codon optimized nucleic acid sequence is at least 1%, at least 2%, at least 5%, at least 10%, at least 15%, at least 20%, at least 30%, at least 40%, or at least 50% higher compared to levels of the protein when encoded by a nucleic acid sequence that is not codon optimized.

[0098] In some embodiments, a system described herein comprises, or a method described herein comprises the use of, a polypeptide comprising one or more (e.g., one) DNA-targeting moiety and one or more effector moiety, e.g., wherein the effector moiety is or comprises MQ1, e.g., bacterial MQ1, or a functional variant or fragment thereof. In some embodiments, MQ1 is Spiroplasma monobiae MQ1, e.g., MQ1 from strain ATCC 33825 and/or corresponding to Uniprot ID P15840. In some embodiments, MQ1 effector moiety is encoded by a nucleotide sequence of SEQ ID NO: 10. In some embodiments, a nucleotide sequence described herein comprises a sequence of SEQ ID NO: 10 or a sequence with at least 80, 85, 90, 95, 99, or 100% identity thereto, or having no more than 20, 19, 18, 17, 16, 15, 14, 13, 12, 11, 10, 9, 8, 7, 6, 5, 4, 3, 2, or 1 positions of difference thereto.

MQ1
(SEQ ID NO: 10)
AGCAAGGTGGAGAACAAGACCAAGAAGCTGCGGGTGTTCGA
GGCCTTCGCCGGCATCGGCGCCCAGCGGAAGGCCCTGGAG
AAGGTGCGGAAGGACGAGTACGAGATCGTGGGCCTGGCCG
AGTGGTACGTGCCCGCCATCGTGATGTACCAGGCCATCCA
CAACAACTTCCACACCAAGCTGGAGTACAAGAGCGTGAGC
CGGGAGGAGATGATCGACTACCTGGAGAACAAGACCCTGA
GCTGGAACAGCAAGAACCCCGTGAGCAACGGCTACTGGAA
GCGGAAGAAGGACGACGAGCTGAAGATCATCTACAACGCC
ATCAAGCTGAGCGAGAAGGAGGGCAACATCTTCGACATCC
GGGACCTGTACAAGCGGACCCTGAAGAACATCGACCTGCT
GACCTACAGCTTCCCCTGCCAGGACCTGAGCCAGCAGGGC
ATCCAGAAGGGCATGAAGCGGGGCAGCGGCACCCGGAGCG
GCCTGCTGTGGGAGATCGAGCGGGCCCTGGACAGCACCGA
GAAGAACGACCTGCCCAAGTACCTGCTGATGGAGAACGTG
GGCGCCCTGCTGCACAAGAAGAACGAGGAGGAGCTGAACC
AGTGGAAGCAGAAGCTGGAGAGCCTGGGCTACCAGAACAG
CATCGAGGTGCTGAACGCCGCCGACTTCGGCAGCAGCCAG
GCCCGGCGGCGGGTGTTCATGATCAGCACCCTGAACGAGT
TCGTGGAGCTGCCCAAGGGCGACAAGAAGCCCAAGAGCAT
CAAGAAGGTGCTGAACAAGATCGTGAGCGAGAAGGACATC
CTGAACAACCTGCTGAAGTACAACCTGACCGAGTTCAAGA
AAACCAAGAGCAACATCAACAAGGCCAGCCTGATCGGCTA
CAGCAAGTTCAACAGCGAGGGCTACGTGTACGACCCCGAG
TTCACCGGCCCCACCCTGACCGCCAGCGGCGCCAACAGCC
GGATCAAGATCAAGGACGGCAGCAACATCCGGAAGATGAA
CAGCGACGAGACCTTCCTGTACATCGGCTTCGACAGCCAG
GACGGCAAGCGGGTGAACGAGATCGAGTTCCTGACCGAGA
ACCAGAAGATCTTCGTGTGCGGCAACAGCATCAGCGTGGA
GGTGCTGGAGGCCATCATCGACAAGATCGGCGGC

[0099] In some embodiments, MQ1 comprises an amino acid sequence of SEQ ID NO: 11. In some embodiments, MQ1 comprises an amino acid sequence of SEQ ID NO: 12. In some embodiments, an effector domain described herein comprises SEQ ID NO: 11 or 12, or a sequence with at least 80, 85, 90, 95, 99, or 100% identity thereto, or having no more than 20, 19, 18, 17, 16, 15, 14, 13, 12, 11, 10, 9, 8, 7, 6, 5, 4, 3, 2, or 1 positions of difference thereto.

MQ1
(SEQ ID NO: 11)
MSKVENKTKKLRVFEAFAGIGAQRKALEKVRKDEYEIVGL
AEWYVPAIVMYQAIHNNFHTKLEYKSVSREEMIDYLENKT
LSWNSKNPVSNGYWKRKKDDELKIIYNAIKLSEKEGNIFD
IRDLYKRTLKNIDLLTYSFPCQDLSQQGIQKGMKRGSGTR
SGLLWEIERALDSTEKNDLPKYLLMENVGALLHKKNEEEL
NQWKQKLESLGYQNSIEVLNAADFGSSQARRRVFMISTLN
EFVELPKGDKKPKSIKKVLNKIVSEKDILNNLLKYNLTEF
KKTKSNINKASLIGYSKFNSEGYVYDPEFTGPTLTASGAN
SRIKIKDGSNIRKMNSDETFLYIGFDSQDGKRVNEIEFLT
ENQKIFVCGNSISVEVLEAIIDKIGG
(SEQ ID NO: 12)
SKVENKTKKLRVFEAFAGIGAQRKALEKVRKDEYEIVGLA
EWYVPAIVMYQAIHNNFHTKLEYKSVSREEMIDYLENKTL
SWNSKNPVSNGYWKRKKDDELKIIYNAIKLSEKEGNIFDI
RDLYKRTLKNIDLLTYSFPCQDLSQQGIQKGMKRGSGTRS
GLLWEIERALDSTEKNDLPKYLLMENVGALLHKKNEEELN
QWKQKLESLGYQNSIEVLNAADFGSSQARRRVFMISTLNE
FVELPKGDKKPKSIKKVLNKIVSEKDILNNLLKYNLTEFK
KTKSNINKASLIGYSKFNSEGYVYDPEFTGPTLTASGANS
RIKIKDGSNIRKMNSDETFLYIGFDSQDGKRVNEIEFLTE
NQKIFVCGNSISVEVLEAIIDKIGG

[0100] In some embodiments, MQ1 for use in a site-specific disrupting agent described herein is a variant, e.g., comprising one or more mutations, relative to wildtype MQ1 (e.g., SEQ ID NO: 11 or SEQ ID NO: 12). In some embodiments, an MQ1 variant comprises one or more amino acid substitutions, deletions, or insertions relative to wildtype MQ1. In some embodiments, an MQ1 variant comprises a K297P substitution. In some embodiments, an MQ1 variant comprises a N299C substitution. In some embodiments, an MQ1 variant comprises a E301Y substitution. In some embodiments, an MQ1 variant comprises a Q147L substitution (e.g., and has reduced DNA methyltransferase activity relative to wildtype MQ1). In some embodiments, an MQ1 variant comprises K297P, N299C, and E301Y substitutions (e.g., and has reduced DNA binding affinity relative to wildtype MQ1). In some embodiments, an MQ1 variant comprises Q147L, K297P, N299C, and E301Y substitutions (e.g., and has reduced DNA methyltransferase activity and DNA binding affinity relative to wildtype MQ1). In some embodiments, the site-specific disrupting agent comprises one or more linkers described herein, e.g., connecting a moiety/domain to another moiety/domain. In some embodiments, the site-specific disrupting agent comprises a targeting moiety that is or comprises a CRISPR/Cas molecule, e.g., comprising a CRISPR/Cas protein, e.g., a dCas9 protein. In some embodiments, the site-specific disrupting agent is a fusion protein comprising an effector moiety that is or comprises MQ1 and a DNA-targeting moiety that is or comprises a CRISPR/Cas molecule, e.g., comprising a CRISPR/Cas protein, e.g., a dCas9 protein; e.g., a dCas9m4. In some embodiments, the site-specific disrupting agent comprises an additional moiety described herein. In some embodiments, the site-specific disrupting agent decreases expression of a target gene or a plurality of target genes (e.g., a target gene or a plurality of target gene described herein). In some embodiments, the site-specific disrupting agent may be used in methods of modulating, e.g., decreasing, gene expression, methods of treating a condition, or methods of epigenetically modifying a target gene or transcription control element described herein. In some embodiments, a system comprises two or more site-specific disrupting agents.

[0101] In some embodiments, a system described herein comprises, or a method described herein comprises the use of, a site-specific disrupting agent or a polypeptide comprising one or more (e.g., one) targeting moiety and one or more effector moiety, wherein the effector moiety is or comprises Krueppel-associated box (KRAB) domain of Zinc Finger protein 10 e.g., as according to NP_056209.2 or the protein encoded by NM_015394.5 or a functional variant or fragment thereof. In some embodiments, KRAB is a synthetic KRAB construct. In some embodiments, KRAB for use in a site-specific disrupting agent described herein is a variant, e.g., comprising one or more mutations, relative to wildtype KRAB (e.g., e.g., as according to NP_056209.2 or the protein encoded by NM_015394.5). In some embodiments, a KRAB variant comprises one or more amino acid substitutions, deletions, or insertions relative to wildtype KRAB. In some embodiments, a KRAB variant comprises a L37P substitution. In some embodiments, KRAB comprises an amino acid sequence of SEQ ID NO: 13:

(SEQ ID NO: 13)
KRAB
DAKSLTAWSRTLVTFKDVFVDFTREEWKLLDTAQQILYRN
VMLENYKNLVSLGYQLTKPDVILRLEKGEEPWLVEREIHQ
ETHPDSETAFEIKSSV

[0102] In some embodiments, the KRAB effector moiety is encoded by a nucleotide sequence of SEQ ID NO: 14. In some embodiments, a nucleotide sequence described herein comprises a sequence of SEQ ID NO: 14 or a sequence with at least 80, 85, 90, 95, 99, or 100% identity thereto, or having no more than 20, 19, 18, 17, 16, 15, 14, 13, 12, 11, 10, 9, 8, 7, 6, 5, 4, 3, 2, or 1 positions of difference thereto.

(SEQ ID NO: 14)
KRAB
GACGCCAAGAGCCTGACCGCCTGGAGCCGGACCCTGGTGA
CCTTCAAGGACGTGTTCGTGGACTTCACCCGGGAGGAGTG
GAAGCTGCTGGACACCGCCCAGCAGATCCTGTACCGGAAC
GTGATGCTGGAGAACTACAAGAACCTGGTGAGCCTGGGCT
ACCAGCTGACCAAGCCCGACGTGATCCTGCGGCTGGAGAA
GGGCGAGGAGCCCTGGCTGGTGGAGCGGGAGATCCACCAG
GAGACCCACCCCGACAGCGAGACCGCCTTCGAGATCAAGA
GCAGCGTG

[0103] In some embodiments, KRAB for use in a polypeptide or a site-specific disrupting agent described herein is a variant, e.g., comprising one or more mutations, relative to the KRAB sequence of SEQ ID NO: 13. In some embodiments, an KRAB variant comprises one or more amino acid substitutions, deletions, or insertions relative to SEQ ID NO: 13.

[0104] In some embodiments, the polypeptide or the site-specific disrupting agent is a fusion protein comprising an effector moiety that is or comprises KRAB and a targeting moiety, e.g., a Crisper/Cas protein. In some embodiments, the polypeptide or the site-specific disrupting agent comprises an additional moiety described herein. In some embodiments, the polypeptide or the site-specific disrupting agent decreases expression of a target gene or a plurality of target genes. In some embodiments, the polypeptide or the site-specific disrupting agent may be used in methods of modulating, e.g., decreasing, gene expression, methods of treating a condition, or methods of epigenetically modifying a target gene or a plurality of target genes, e.g., a transcription control element described herein.

[0105] In some embodiments, a system described herein comprises, or a method described herein comprises the use of, a site-specific disrupting agent or a polypeptide comprising one or more (e.g., one) targeting moiety and one or more effector moiety, wherein the effector moiety is or comprises DNMT3a/3L complex, or a functional variant or fragment thereof. In some embodiments, the DNMT3a/3L complex is a fusion construct. In some embodiments the DNMT3a/3L complex comprises DNMT3A, e.g., human DNMT3A, e.g., as according to NP_072046.2 or the protein encoded by NM_022552.4) or the protein encoded by NM_022552.4 or a functional variant or fragment thereof, e.g., aa 679-912 of human DNMT3A, e.g., as according to NP_072046.2 or the protein encoded by NM_022552.4). In some embodiments the DNMT3a/3L complex comprises human DNMT3L or a functional fragment or variant thereof (e.g., as according to NP_787063.1 or the protein encoded by NM_175867.3 or a functional variant or fragment thereof, e.g., aa 274-386 of human DNMT3L as according to NP_787063.1 or the protein encoded by NM_175867.3). In some embodiments, DNMT3a/3L comprises an amino acid sequence of SEQ ID NO:15. In some embodiments, an effector moiety described herein comprises SEQ ID NO: 15, or a sequence with at least 80, 85, 90, 95, 99, or 100% identity thereto, or having no more than 20, 19, 18, 17, 16, 15, 14, 13, 12, 11, 10, 9, 8, 7, 6, 5, 4, 3, 2, or 1 positions of difference thereto.

(SEQ ID NO: 15)
DNMT3A/31 (h)
NHDQEFDPPKVYPPVPAEKRKPIRVLSLFDGIATGLLVLK
DLGIQVDRYIASEVCEDSITVGMVRHQGKIMYVGDVRSVT
QKHIQEWGPFDLVIGGSPCNDLSIVNPARKGLYEGTGRLF
FEFYRLLHDARPKEGDDRPFFWLFENVVAMGVSDKRDISR
FLESNPVMIDAKEVSAAHRARYFWGNLPGMNRPLASTVND
KLELQECLEHGRIAKFSKVRTITTRSNSIKQGKDQHFPVF
MNEKEDILWCTEMERVFGFPVHYTDVSNMSRLARQRLLGR
SWSVPVIRHLFAPLKEYFACVSSGNSNANSRGPSFSSGLV
PLSLRGSHMNPLEMFETVPVWRRQPVRVLSLFEDIKKELT
SLGFLESGSDPGQLKHVVDVTDTVRKDVEEWGPFDLVYGA
TPPLGHTCDRPPSWYLFQFHRLLQYARPKPGSPRPFFWMF
VDNLVLNKEDLDVASRFLEMEPVTIPDVHGGSLQNAVRVW
SNIPAIRSRHWALVSEEELSLLAQNKQSSKLAAKWPTKLV
KNCFLPLREYFKYFSTELTSSL

[0106] In some embodiments, DNMT3a/3L is encoded by a nucleotide sequence of SEQ ID NO: 16. In some embodiments, a nucleic acid described herein comprises a sequence of SEQ ID NO: 16 or a sequence with at least 80, 85, 90, 95, 99, or 100% identity thereto, or having no more than 20, 19, 18, 17, 16, 15, 14, 13, 12, 11, 10, 9, 8, 7, 6, 5, 4, 3, 2, or 1 positions of difference thereto.

DNMT3A/31 (h)
(SEQ ID NO: 16)
AACCACGACCAGGAGTTCGACCCCCCCAAGGTGTACCCCC
CCGTGCCCGCCGAGAAGCGGAAGCCCATCCGGGTGCTGAG
CCTGTTCGACGGCATCGCCACCGGCCTGCTGGTGCTGAAG
GACCTGGGCATCCAGGTGGACCGGTACATCGCCAGCGAGG
TGTGCGAGGACAGCATCACCGTGGGCATGGTGCGGCACCA
GGGCAAGATCATGTACGTGGGCGACGTGCGGAGCGTGACC
CAGAAGCACATCCAGGAGTGGGGCCCCTTCGACCTGGTGA
TCGGCGGCAGCCCCTGCAACGACCTGAGCATCGTGAACCC
CGCCCGGAAGGGCCTGTACGAGGGCACCGGCCGGCTGTTC
TTCGAGTTCTACCGGCTGCTGCACGACGCCCGGCCCAAGG
AGGGCGACGACCGGCCCTTCTTCTGGCTGTTCGAGAACGT
GGTGGCCATGGGCGTGAGCGACAAGCGGGACATCAGCCGG
TTCCTGGAGAGCAACCCCGTGATGATCGACGCCAAGGAGG
TGAGCGCCGCCCACCGGGCCCGGTACTTCTGGGGCAACCT
GCCCGGCATGAACCGGCCCCTGGCCAGCACCGTGAACGAC
AAGCTGGAGCTGCAGGAGTGCCTGGAGCACGGCCGGATCG
CCAAGTTCAGCAAGGTGCGGACCATCACCACCCGGAGCAA
CAGCATCAAGCAGGGCAAGGACCAGCACTTCCCCGTGTTC
ATGAACGAGAAGGAGGACATCCTGTGGTGCACCGAGATGG
AGCGGGTGTTCGGCTTCCCCGTGCACTACACCGACGTGAG
CAACATGAGCCGGCTGGCCCGGCAGCGGCTGCTGGGCCGG
AGCTGGAGCGTGCCCGTGATCCGGCACCTGTTCGCCCCCC
TGAAGGAGTACTTCGCCTGCGTGAGCAGCGGCAACAGCAA
CGCCAACAGCCGGGGCCCCAGCTTCAGCAGCGGCCTGGTG
CCCCTGAGCCTGCGGGGCAGCCACATGAATCCTCTGGAGA
TGTTCGAGACAGTGCCCGTGTGGAGAAGGCAACCCGTGAG
GGTGCTGAGCCTCTTCGAGGACATTAAGAAGGAGCTGACC
TCTCTGGGCTTTCTGGAATCCGGCAGCGACCCCGGCCAGC
TGAAACACGTGGTGGACGTGACCGACACAGTGAGGAAGGA
CGTGGAAGAGTGGGGCCCCTTTGACCTCGTGTATGGAGCC
ACACCTCCTCTCGGCCACACATGCGATAGGCCTCCCAGCT
GGTATCTCTTCCAGTTCCACAGACTGCTCCAGTACGCCAG
ACCTAAGCCCGGCAGCCCCAGACCCTTCTTCTGGATGTTC
GTGGACAATCTGGTGCTGAACAAGGAGGATCTGGATGTGG
CCAGCAGATTTCTGGAGATGGAACCCGTGACAATCCCCGA
CGTGCATGGCGGCTCTCTGCAGAACGCCGTGAGAGTGTGG
TCCAACATCCCCGCCATTAGAAGCAGACACTGGGCTCTGG
TGAGCGAGGAGGAACTGTCTCTGCTGGCCCAGAATAAGCA
GTCCTCCAAGCTGGCCGCCAAGTGGCCCACCAAGCTGGTG
AAGAACTGCTTTCTGCCTCTGAGGGAGTATTTCAAGTATT
TCAGCACCGAACTGACCAGCAGCCTG

[0107] In some embodiments, a system described herein comprises, or a method described herein comprises the use of, a site-specific disrupting agent or a polypeptide comprising one or more (e.g., one) targeting moiety and one or more effector moiety, wherein the effector moiety is or comprises EZH2, e.g., as according to NP-004447.2 or NP_001190176.1 2 or the protein encoded by NM_004456.5 or NM_001203247.2 or a functional variant or fragment thereof. In some embodiments, MQ1 for use in a site-specific disrupting agent described herein is a variant, e.g., comprising one or more mutations, relative to EZH2, e.g., as according to NP-004447.2 or NP_001190176.1 2 or the protein encoded by NM_004456.5 or NM_001203247.2. In some embodiments, an EZH2 variant comprises one or more amino acid substitutions, deletions, or insertions relative to wildtype EZH2. In some embodiments, EZH2 comprises an amino acid sequence of SEQ ID NO: 17:

EZH2
(SEQ ID NO: 17)
GQTGKKSEKGPVCWRKRVKSEYMRLRQLKRFRRADEVKSM
FSSNRQKILERTEILNQEWKQRRIQPVHILTSVSSLRGTR
ECSVTSDLDFPTQVIPLKTLNAVASVPIMYSWSPLQQNFM
VEDETVLHNIPYMGDEVLDQDGTFIEELIKNYDGKVHGDR
ECGFINDEIFVELVNALGQYNDDDDDDDGDDPEEREEKQK
DLEDHRDDKESRPPRKFPSDKIFEAISSMFPDKGTAEELK
EKYKELTEQQLPGALPPECTPNIDGPNAKSVQREQSLHSF
HTLFCRRCFKYDCFLHPFHATPNTYKRKNTETALDNKPCG
PQCYQHLEGAKEFAAALTAERIKTPPKRPGGRRRGRLPNN
SSRPSTPTINVLESKDTDSDREAGTETGGENNDKEEEEKK
DETSSSSEANSRCQTPIKMKPNIEPPENVEWSGAEASMFR
VLIGTYYDNFCAIARLIGTKTCRQVYEFRVKESSIIAPAP
AEDVDTPPRKKKRKHRLWAAHCRKIQLKKDGSSNHVYNYQ
PCDHPRQPCDSSCPCVIAQNFCEKFCQCSSECQNRFPGCR
CKAQCNTKQCPCYLAVRECDPDLCLTCGAADHWDSKNVSC
KNCSIQRGSKKHLLLAPSDVAGWGIFIKDPVQKNEFISEY
CGEIISQDEADRRGKVYDKYMCSFLFNLNNDFVVDATRKG
NKIRFANHSVNPNCYAKVMMVNGDHRIGIFAKRAIQTGEE
LFFDYRYSQADALKYVGIEREMEIP

[0108] In some embodiments, the EZH2 effector moiety is encoded by a nucleotide sequence of SEQ ID NO: 18. In some embodiments, a nucleotide sequence described herein comprises a sequence of SEQ ID NO: 18 or a sequence with at least 80, 85, 90, 95, 99, or 100% identity thereto, or having no more than 20, 19, 18, 17, 16, 15, 14, 13, 12, 11, 10, 9, 8, 7, 6, 5, 4, 3, 2, or 1 positions of difference thereto.

EZH2
(SEQ ID NO: 18)
GGCCAGACCGGCAAGAAGAGCGAGAAGGGCCCCGTGTGCT
GGCGGAAGCGGGTGAAGAGCGAGTACATGCGGCTGCGGCA
GCTGAAGCGGTTCCGGCGGGCCGACGAGGTGAAGAGCATG
TTCAGCAGCAACCGGCAGAAGATCCTGGAGCGGACCGAGA
TCCTGAACCAGGAGTGGAAGCAGCGGCGAATCCAGCCCGT
GCACATCCTGACCAGCGTGAGCAGCCTGCGGGGCACCCGG
GAGTGCAGCGTGACCAGCGACCTGGACTTCCCCACCCAGG
TGATCCCCCTAAAGACCCTGAACGCCGTGGCCAGCGTGCC
CATCATGTACAGCTGGAGCCCCCTGCAGCAGAACTTCATG
GTGGAGGACGAGACCGTGCTGCACAACATCCCCTACATGG
GCGACGAGGTGCTGGACCAGGACGGCACCTTCATCGAGGA
GCTGATCAAGAACTACGACGGCAAGGTGCACGGCGACCGG
GAGTGCGGCTTCATCAACGACGAGATCTTCGTGGAGCTGG
TGAACGCCCTGGGCCAGTACAACGACGACGACGACGACGA
CGACGGCGACGACCCCGAGGAGCGGGAGGAGAAGCAGAAG
GACCTGGAGGACCACCGGGACGACAAGGAGAGCCGGCCCC
CCCGGAAGTTCCCCAGCGACAAGATCTTCGAGGCCATCAG
CAGCATGTTCCCCGACAAGGGCACCGCCGAGGAGCTGAAG
GAGAAGTACAAGGAGCTGACCGAGCAGCAGCTGCCCGGCG
CCCTGCCCCCCGAGTGCACCCCCAACATCGACGGCCCCAA
CGCCAAGAGCGTGCAGCGGGAGCAGAGCCTGCACAGCTTC
CACACCCTGTTCTGCCGGCGGTGCTTCAAGTACGACTGCT
TCCTGCACCCCTTCCACGCCACCCCCAACACCTACAAGCG
GAAGAACACCGAGACCGCCCTGGACAACAAGCCCTGCGGC
CCCCAGTGCTACCAGCACCTGGAGGGCGCCAAGGAGTTCG
CCGCCGCCCTGACCGCCGAGCGGATCAAGACCCCCCCCAA
GCGGCCCGGCGGCCGGCGGCGGGGCCGGCTGCCCAACAAC
AGCAGCCGGCCCAGCACCCCCACCATCAACGTGCTGGAGA
GCAAGGACACCGACAGCGACCGGGAGGCCGGCACCGAGAC
CGGCGGCGAGAACAACGACAAGGAGGAGGAGGAGAAGAAG
GACGAGACCAGCAGCAGCAGCGAGGCCAACAGCCGGTGCC
AGACCCCCATCAAGATGAAGCCCAACATCGAGCCCCCCGA
GAACGTGGAGTGGAGCGGCGCCGAGGCCAGCATGTTCCGG
GTGCTGATCGGCACCTACTACGACAACTTCTGCGCCATCG
CCCGGCTGATCGGCACCAAGACCTGCCGGCAGGTGTACGA
GTTCCGGGTGAAGGAGAGCAGCATCATCGCCCCCGCCCCC
GCCGAGGACGTGGACACCCCCCCCCGGAAGAAGAAGCGGA
AGCACCGGCTGTGGGCCGCCCACTGCCGGAAGATCCAGCT
GAAGAAGGACGGCAGCAGCAACCACGTGTACAACTACCAG
CCCTGCGACCACCCCCGGCAGCCCTGCGACAGCAGCTGCC
CCTGCGTGATCGCCCAGAACTTCTGCGAGAAGTTCTGCCA
GTGCAGCAGCGAGTGCCAGAACCGGTTCCCCGGCTGCCGG
TGCAAGGCCCAGTGCAACACCAAGCAGTGCCCCTGCTACC
TGGCCGTGCGGGAGTGCGACCCCGACCTGTGCCTGACCTG
CGGCGCCGCCGACCACTGGGACAGCAAGAACGTGAGCTGC
AAGAACTGCAGCATCCAGCGGGGCAGCAAGAAGCACCTGC
TGCTGGCCCCCAGCGACGTGGCCGGCTGGGGCATCTTCAT
CAAGGACCCCGTGCAGAAGAACGAGTTCATCAGCGAGTAC
TGCGGCGAGATCATCAGCCAGGACGAGGCCGACCGGCGGG
GCAAGGTGTACGACAAGTACATGTGCAGCTTCCTGTTCAA
CCTGAACAACGACTTCGTGGTGGACGCCACCCGGAAGGGC
AACAAGATCCGGTTCGCCAACCACAGCGTGAACCCCAACT
GCTACGCCAAGGTGATGATGGTGAACGGCGACCACCGGAT
CGGCATCTTCGCCAAGCGGGCCATCCAGACCGGCGAGGAG
CTGTTCTTCGACTACCGGTACAGCCAGGCCGACGCCCTGA
AGTACGTGGGCATCGAGCGGGAGATGGAGATCCCC

[0109] In some embodiments, EZH2 for use in a polypeptide or a site-specific disrupting agent described herein is a variant, e.g., comprising one or more mutations, relative to the EZH2 sequence of SEQ ID NO: 17. In some embodiments, an EZH2 variant comprises one or more amino acid substitutions, deletions, or insertions relative to SEQ ID NO: 17.

[0110] In some embodiments, the polypeptide or the site-specific disrupting agent is a fusion protein comprising an effector moiety that is or comprises EZH2 and a targeting moiety. In some embodiments, the polypeptide or the site-specific disrupting agent comprises an additional moiety described herein. In some embodiments, the polypeptide or the site-specific disrupting agent decreases expression of a target gene or a plurality of target genes. In some embodiments, the polypeptide or the site-specific disrupting agent may be used in methods of modulating, e.g., decreasing, gene expression, methods of treating a condition, or methods of epigenetically modifying a target gene or a plurality of target genes, e.g., a transcription control element described herein.

[0111] In some embodiments, a system described herein comprises, or a method described herein comprises the use of, a site-specific disrupting agent or a polypeptide comprising one or more (e.g., one) targeting moiety and one or more effector moiety, wherein the effector moiety is or comprises HDAC8, e.g., as according to NP_001159890 or NP_060956.1 or the protein encoded by NM_001166418 or NM_018486.3 or a functional variant or fragment thereof. In some embodiments, HDAC8 comprises an amino acid sequence of SEQ ID NO: 19:

HDAC8
(SEQ ID NO: 19)
EEPEEPADSGQSLVPVYIYSPEYVSMCDSLAKIPKRASMV
HSLIEAYALHKQMRIVKPKVASMEEMATFHTDAYLQHLQK
VSQEGDDDHPDSIEYGLGYDCPATEGIFDYAAAIGGATIT
AAQCLIDGMCKVAINWSGGWHHAKKDEASGFCYLNDAVLG
ILRLRRKFERILYVDLDLHHGDGVEDAFSFTSKVMTVSLH
KFSPGFFPGTGDVSDVGLGKGRYYSVNVPIQDGIQDEKYY
QICESVLKEVYQAFNPKAVVLQLGADTIAGDPMCSFNMTP
VGIGKCLKYILQWQLATLILGGGGYNLANTARCWTYLTGV
ILGKTLSSEIPDHEFFTAYGPDYVLEITPSCRPDRNEPHR
IQQILNYIKGNLKHVV

[0112] In some embodiments, the HDAC8 effector moiety is encoded by a nucleotide sequence of SEQ ID NO: 66. In some embodiments, a nucleotide sequence described herein comprises a sequence of SEQ ID NO: 66 or a sequence with at least 80, 85, 90, 95, 99, or 100% identity thereto, or having no more than 20, 19, 18, 17, 16, 15, 14, 13, 12, 11, 10, 9, 8, 7, 6, 5, 4, 3, 2, or 1 positions of difference thereto.

HDAC8
(SEQ ID NO: 66)
GAGGAGCCCGAGGAGCCCGCCGATAGCGGACAATCTCTGG
TGCCCGTCTACATCTACAGCCCCGAATATGTGAGCATGTG
TGATTCCCTCGCCAAGATCCCTAAGAGAGCCAGCATGGTG
CATTCTCTGATCGAGGCCTACGCTCTGCATAAGCAAATGA
GGATCGTGAAGCCCAAGGTCGCCAGCATGGAAGAGATGGC
CACCTTTCACACCGATGCCTACCTCCAACATCTCCAGAAG
GTGTCCCAAGAGGGCGACGACGACCACCCCGACTCCATTG
AGTACGGACTGGGCTATGATTGCCCCGCCACCGAGGGCAT
CTTTGACTATGCCGCCGCTATCGGCGGAGCTACCATCACA
GCCGCCCAGTGTCTGATTGATGGCATGTGCAAGGTCGCCA
TCAACTGGTCCGGAGGCTGGCATCATGCCAAGAAGGATGA
GGCCTCCGGCTTCTGTTATCTGAATGACGCCGTGCTGGGC
ATTCTGAGACTGAGGAGGAAATTCGAGAGGATTCTGTACG
TGGATCTGGATCTGCATCACGGAGATGGAGTCGAAGATGC
CTTCAGCTTCACCAGCAAGGTGATGACAGTCTCTCTGCAC
AAGTTCTCCCCCGGCTTCTTTCCCGGAACCGGCGACGTGT
CCGACGTGGGACTGGGCAAGGGAAGGTACTACAGCGTGAA
CGTGCCCATTCAAGACGGCATCCAAGACGAGAAGTACTAC
CAGATCTGCGAGTCCGTGCTCAAGGAGGTCTACCAAGCCT
TCAATCCTAAGGCTGTCGTGCTCCAACTGGGAGCTGATAC
CATTGCTGGCGATCCCATGTGCAGCTTCAATATGACACCC
GTCGGAATCGGCAAGTGCCTCAAGTACATCCTCCAGTGGC
AGCTCGCCACCCTCATTCTCGGAGGAGGCGGATACAATCT
GGCTAATACCGCCAGATGCTGGACCTATCTGACCGGCGTG
ATTCTGGGCAAAACACTGAGCAGCGAAATCCCCGACCACG
AGTTTTTCACCGCTTACGGCCCCGACTACGTGCTGGAGAT
CACCCCCAGCTGCAGACCCGATAGAAACGAACCCCATAGA
ATCCAGCAAATTCTGAACTATATCAAGGGCAACCTCAAGC
ACGTCGTG

[0113] In some embodiments, the HDAC8 for use in a polypeptide or a site-specific disrupting agent described herein is a variant, e.g., comprising one or more mutations, relative to the HDAC8 sequence of SEQ ID NO: 19. In some embodiments, an HDAC8 variant comprises one or more amino acid substitutions, deletions, or insertions relative to SEQ ID NO: 19.

[0114] In some embodiments, the polypeptide or the site-specific disrupting agent is a fusion protein comprising an effector moiety that is or comprises HDAC8 and a targeting moiety. In some embodiments, the polypeptide or the site-specific disrupting agent comprises an additional moiety described herein. In some embodiments, the polypeptide or the site-specific disrupting agent decreases expression of a target gene or a plurality of target genes. In some embodiments, the polypeptide or the site-specific disrupting agent may be used in methods of modulating, e.g., decreasing, gene expression, methods of treating a condition, or methods of epigenetically modifying a target gene or a plurality of target genes, e.g., a transcription control element described herein.

[0115] In some embodiments, a system described herein comprises, or a method described herein comprises the use of, a site-specific disrupting agent or a polypeptide comprising one or more (e.g., one) targeting moiety and one or more effector moiety, wherein the effector moiety is or comprises G9A e.g., as according to NP_001350618.1 or the protein encoded by NM_001363689.1 or a functional variant or fragment thereof, e.g., aa967-1250 of comprises G9A e.g., as according to NP_001350618.1 or the protein encoded by NM_001363689.1. In some embodiments, G9A comprises an amino acid sequence of SEQ ID NO: 67:

G9A
(SEQ ID NO: 67)
GNRAIRTEKIICRDVARGYENVPIPCVNGVDGEPCPEDYK
YISENCETSTMNIDRNITHLQHCTCVDDCSSSNCLCGQLS
IRCWYDKDGRLLQEFNKIEPPLIFECNQACSCWRNCKNRV
VQSGIKVRLQLYRTAKMGWGVRALQTIPQGTFICEYVGEL
ISDAEADVREDDSYLFDLDNKDGEVYCIDARYYGNISRFI
NHLCDPNIIPVRVFMLHQDLRFPRIAFFSSRDIRTGEELG
FDYGDRFWDIKSKYFTCQCGSEKCKHSAEAIALEQSRLAR
LD

[0116] In some embodiments, the G9A effector moiety is encoded by a nucleotide sequence of SEQ ID NO: 68. In some embodiments, a nucleotide sequence described herein comprises a sequence of SEQ ID NO: 68 or a sequence with at least 80, 85, 90, 95, 99, or 100% identity thereto, or having no more than 20, 19, 18, 17, 16, 15, 14, 13, 12, 11, 10, 9, 8, 7, 6, 5, 4, 3, 2, or 1 positions of difference thereto.

G9A
(SEQ ID NO: 68)
GGAAATAGGGCTATCAGAACCGAGAAGATCATCTGTAGGG
ACGTGGCTAGAGGCTACGAGAACGTGCCCATTCCTTGCGT
GAATGGCGTGGATGGCGAACCTTGCCCCGAGGACTACAAA
TACATCTCCGAGAACTGCGAAACCAGCACAATGAACATCG
ACAGAAACATCACCCACCTCCAGCACTGCACATGTGTGGA
TGACTGCTCCTCCAGCAACTGTCTGTGCGGCCAGCTCTCC
ATCAGATGCTGGTACGACAAGGACGGCAGACTGCTGCAAG
AGTTCAACAAGATCGAACCCCCTCTCATCTTCGAGTGTAA
CCAAGCTTGCAGCTGCTGGAGAAACTGCAAGAATAGAGTG
GTCCAGAGCGGCATCAAGGTGAGACTGCAACTGTACAGAA
CCGCCAAGATGGGATGGGGAGTGAGGGCTCTGCAAACCAT
TCCCCAAGGCACCTTCATCTGCGAATACGTGGGCGAACTG
ATCTCCGACGCCGAAGCTGACGTGAGAGAGGACGACAGCT
ATCTCTTCGATCTGGACAATAAGGACGGCGAGGTGTACTG
CATCGACGCTAGATATTACGGCAACATCTCTAGATTCATC
AACCACCTCTGCGATCCCAACATCATTCCCGTGAGGGTGT
TCATGCTGCACCAAGATCTGAGGTTCCCTAGAATCGCCTT
CTTCAGCTCTAGAGACATCAGAACCGGCGAGGAGCTGGGC
TTCGATTACGGCGATAGATTCTGGGACATCAAGTCCAAGT
ACTTCACATGCCAGTGCGGCAGCGAGAAGTGTAAGCACAG
CGCTGAGGCCATTGCTCTGGAGCAGTCTAGACTGGCCAGA
CTGGAT

[0117] In some embodiments, G9A for use in a polypeptide or a site-specific disrupting agent described herein is a variant, e.g., comprising one or more mutations, relative to the G9A sequence of SEQ ID NO: 67. In some embodiments, an G9A variant comprises one or more amino acid substitutions, deletions, or insertions relative to SEQ ID NO: 67.

[0118] In some embodiments, the polypeptide or the site-specific disrupting agent is a fusion protein comprising an effector moiety that is or comprises G9A and a targeting moiety. In some embodiments, the polypeptide or the site-specific disrupting agent comprises an additional moiety described herein. In some embodiments, the polypeptide or the site-specific disrupting agent decreases expression of a target gene or a plurality of target genes. In some embodiments, the polypeptide or the site-specific disrupting agent may be used in methods of modulating, e.g., decreasing, gene expression, methods of treating a condition, or methods of epigenetically modifying a target gene or a plurality of target genes, e.g., a transcription control element described herein.

### Systems

[0119] Systems of the present disclosure may comprise two or more site-specific disrupting agents. In some embodiments, a site-specific disrupting agent system comprises 2, 3, 4, 5, 6, 7, 8, 9, 10, 11, 12, or more, site-specific disrupting agents (and optionally no more than 15, 14, 13, 12, 11, 10, 9, 8, 7, 6, 5, 4, 3, or 2). In some embodiments, system targets two or more different sequences (e.g., a 1st and 2nd, 3rd, 4th, 5th, 6th, 7th, 8th, 9th, 10th, 11th, 12th, and/or further DNA sequence, and optionally no more than a 20th, 19th, 18th, 17th, 16th, 15th, 14th, 13th, 12th, 11th, 10th, 9th, 8th, 6th, 5th, 4th, 3rd, or 2nd sequence). In some embodiments, system comprises a plurality of site-specific disrupting agents, wherein each member of the plurality of site-specific disrupting agents does not detectably bind, e.g., does not bind, to another member of the plurality of site-specific disrupting agents. In some embodiments, system comprises a first site-specific disrupting agent and a second site-specific disrupting agent, wherein the first site-specific disrupting agent does not detectably bind, e.g., does not bind, to the second site-specific disrupting agent.

[0120] In some embodiments, a system of the present disclosure comprises two or more site-specific disrupting agents, wherein the site-specific disrupting agents are present together in a composition, pharmaceutical composition, or mixture. In some embodiments, a system of the present disclosure comprises two or more site-specific disrupting agents, wherein one or more site-specific disrupting agents is not admixed with at least one other site-specific disrupting agent. In some embodiments, a system may comprise a first site-specific disrupting agent and a second site-specific disrupting agent, wherein the presence of the first site-specific disrupting agent in the nucleus of a cell does not overlap with the presence of the second site-specific disrupting agent in the nucleus of the same cell, wherein the system achieves a decrease in expression of a plurality of genes via the non-overlapping presences of the first and second site-specific disrupting agents. In some embodiments, the first site-specific disrupting agent and a second site-specific disrupting agent may act simultaneously or sequentially.

[0121] In some embodiments, the site-specific disrupting agents of a system each comprise a different targeting moiety (e.g., the first, second, third, or further site-specific disrupting agents each comprise different targeting moieties from one another). For example, a system may comprise a first site-specific disrupting agent and a second site-specific disrupting agent wherein the first site-specific disrupting agent comprises a first targeting moiety (e.g., a Cas9 domain, TAL effector domain, or Zn Finger domain), and the second site-specific disrupting agent comprises a second targeting moiety (e.g., a Cas9 domain, TAL effector domain, or Zn Finger domain) different from the first targeting moiety. In some embodiments, different can mean comprising distinct types of targeting moiety, e.g., the first targeting moiety comprises a Cas9 domain, and the second DNA-targeting moiety comprises a Zn finger domain. In other embodiments, different can mean comprising distinct variants of the same type of targeting moiety, e.g., the first targeting moiety comprises a first Cas9 domain (e.g., from a first species) and the second targeting moiety comprises a second Cas9 domain (e.g., from a second species).

[0122] In an embodiment, when a system comprises two or more targeting moieties of the same type, e.g., two or more Cas9 or Zn finger domains, the targeting moieties specifically bind two or more different sequences. For example, in a system comprising two or more Cas9 domains, the two or more Cas9 domains may be chosen or altered such that they only appreciably bind the gRNA corresponding to their target sequence (e.g., and do not appreciably bind the gRNA corresponding to the target of another Cas9 domain). In a further example, in a system comprising two or more effector moieties, the two or more effector moieties may be chosen or altered such that they only appreciably bind to their target sequence (e.g., and do not appreciably bind the target sequence of another effector moiety).

[0123] In some embodiments, a system comprises three or more site-specific disrupting agents and two or more site-specific disrupting agents comprise the same targeting moiety. For example, a system may comprise three site-specific disrupting agents, wherein the first and second site-specific disrupting agents both comprise a first targeting moiety and the third site-specific disrupting agent comprises a second different targeting moiety. For a further example, a system may comprise four site-specific disrupting agents, wherein the first and second site-specific disrupting agents both comprise a first targeting moiety and the third and fourth site-specific disrupting agents comprises a second different targeting moiety. For a further example, a system may comprise five site-specific disrupting agents, wherein the first and second site-specific disrupting agents both comprise a first targeting moiety, the third and fourth site-specific disrupting agents both comprise a second different targeting moiety, and the fifth site-specific disrupting agent comprises a third different targeting moiety. As described above, different can mean comprising different types of -targeting moieties or comprising distinct variants of the same type of targeting moiety.

[0124] In some embodiments, the site-specific disrupting agents of a system each bind to a different DNA sequence (e.g., the first, second, third, or further site-specific disrupting agents each bind DNA sequences that are different from one another). For example, a system may comprise a first site-specific disrupting agent and a second site-specific disrupting agent wherein the first site-specific disrupting agent binds to a first DNA sequence, and the second site-specific disrupting agent binds to a second DNA sequence. In some embodiments involving different DNA sequences, there is at least one position that is not identical between the DNA sequence bound by one site-specific disrupting agent and the DNA sequence bound by another site-specific disrupting agent, or there is at least one position present in the DNA sequence bound by one site-specific disrupting agent that is not present in the DNA sequence bound by another site-specific disrupting agent.

[0125] In some embodiments, the first DNA sequence may be situated on a first genomic DNA strand and the second DNA sequence may be situated on a second genomic DNA strand. In some embodiments, the first DNA sequence may be situated on the same genomic DNA strand as the second DNA sequence.

[0126] In some embodiments, a system comprises three or more site-specific disrupting agents and two or more site-specific disrupting agents bind the same DNA sequence. For example, a system may comprise three site-specific disrupting agents, wherein the first and site-specific disrupting agents both bind a first DNA sequence, and the third site-specific disrupting agent binds a second different DNA sequence. For a further example, a system may comprise four site-specific disrupting agents, wherein the first and second site-specific disrupting agents both bind a first DNA sequence and the third and fourth site-specific disrupting agents both bind a second DNA sequence. For a further example, a system may comprise five site-specific disrupting agents, wherein the first and second site-specific disrupting agents both bind a first DNA sequence, the third and fourth site-specific disrupting agents both bind a second DNA sequence, and the fifth site-specific disrupting agent binds a third DNA sequence. As described above, different can mean that there is at least one position that is not identical between the DNA sequence bound by one site-specific disrupting agent and the DNA sequence bound by another site-specific disrupting agent, or that there is at least one position present in the DNA sequence bound by one site-specific disrupting agent that is not present in the DNA sequence bound by another site-specific disrupting agent.

[0127] In some embodiments, a system comprises two or more (e.g., two) site-specific disrupting agents and a plurality (e.g., two) of the site-specific disrupting agents comprise targeting moieties that bind to different DNA sequences. In such embodiments, a first targeting moiety may bind to a first DNA sequence and a second DNA-targeting moiety may bind to a second DNA sequence, wherein the first and the second DNA sequences are different and do not overlap. In some such embodiments, the first DNA sequence is separated from the second DNA sequence by at least 1, 2, 3, 4, 5, 6, 7, 8, 9, 10, 11, 12, 13, 14, 15, 16, 17, 18, 19, 20, 25, 30, 35, 40, 45, 50, 55, 60, 65, 70, 75, 80, 85, 90, 95, or 100 base pairs (and optionally, no more than 500, 400, 300, 200, 100, 95, 90, 85, 80, 75, 70, 65, 60, 55, or 50 base pairs). In some such embodiments, the first DNA sequence is separated from the second DNA sequence by no more than 1, 2, 3, 4, 5, 6, 7, 8, 9, 10, 11, 12, 13, 14, 15, 16, 17, 18, 19, 20, 25, 30, 35, 40, 45, 50, 55, 60, 65, 70, 75, 80, 85, 90, 95, or 100 base pairs (and optionally, no base pairs, e.g., the first and second sequence are directly adjacent one another).

[0128] In some embodiments, the site-specific disrupting agents of a system each comprise a different effector moiety (e.g., the first, second, third, or further site-specific disrupting agents each comprise a different effector moiety from one another). For example, a system may comprise a first site-specific disrupting agent and a second site-specific disrupting agent wherein the first site-specific disrupting agent comprises a first effector moiety, and the second site-specific disrupting agent comprises a second effector moiety different from the first effector moiety. In some embodiments, the different effector moieties comprise distinct types of effector moiety. In other embodiments, the different effector moieties comprise distinct variants of the same type of effector moiety.

[0129] Targeting Moieties

[0130] Targeting moieties may specifically bind a DNA sequence, e.g., a DNA sequence associated with a target plurality of genes, e.g., an anchor sequence of an ASMC comprising the target plurality of genes. Any molecule or compound that specifically binds a DNA sequence may be used as a targeting moiety. In some embodiments, a targeting moiety comprises a nucleic acid, e.g., comprising a sequence that is complementary to an anchor sequence, e.g., an anchor sequence of an ASMC comprising the target plurality of genes. In some embodiments, the nucleic acid is an oligonucleotide that physically/sterically blocks binding a genomic complex component (e.g., a nucleating polypeptide, e.g., CTCF) to an anchor sequence. In some embodiments, the nucleic acid comprises a guide RNA (gRNA), e.g., compatible with a CRISPR/Cas molecule. In some embodiments, a targeting moiety comprises a CRISPR/Cas molecule, a TAL effector molecule, a Zn finger molecule, a tetR domain, a meganuclease, a peptide nucleic acid (PNA) or a nucleic acid molecule.

[0131] In some embodiments, a targeting moiety binds to its target sequence with a K_{D} of less than or equal to 500, 450, 400, 350, 300, 250, 200, 150, 100, 50, 40, 30, 20, 10, 9, 8, 7, 6, 5, 4, 3, 2, 1, 0.9, 0.8, 0.7, 0.6, 0.5, 0.4, 0.3, 0.2, 0.1, 0.09, 0.08, 0.07, 0.06, 0.05, 0.04, 0.03, 0.02, 0.01, 0.005, 0.002, or 0.001 nM (and optionally, a K_{D} of at least 50, 40, 30, 20, 10, 9, 8, 7, 6, 5, 4, 3, 2, 1, 0.9, 0.8, 0.7, 0.6, 0.5, 0.4, 0.3, 0.2, 0.1, 0.09, 0.08, 0.07, 0.06, 0.05, 0.04, 0.03, 0.02, 0.01, 0.005, 0.002, or 0.001 nM). In some embodiments, a targeting moiety binds to its target sequence with a K_{D} of 0.001 nM to 500 nM, e.g., 0.1 nM to 5 nM, e.g., about 0.5 nM. In some embodiments, a targeting moiety binds to a non-target sequence with a K_{D} of at least 500, 600, 700, 800, 900, 1000, 2000, 5000, 10,000, or 100,000 nM (and optionally, does not appreciably bind to a non-target sequence). In some embodiments, a targeting moiety does not bind to a non-target sequence.

[0132] In some embodiments, a targeting moiety comprises a nucleic acid comprising a sequence selected from Table 7 or a sequence having at least 70, 75, 80, 85, 90, 91, 92, 93, 94, 95, 96, 97, 98, or 99% identity thereto, or differing at no more than 1, 2, 3, 4, or 5 positions relative thereto.

TABLE 7
Exemplary sequences

| Name | Sequence | SEQ ID NO. |
|---|---|---|
| GD-28481 | AGCCCCACCTTGTGGTCAGA | 21 |
| GD-28482 | AGTGCTGCCTTCTGACCACA | 22 |
| GD-28483 | GCTGCCTTCTGACCACAAGG | 23 |
| GD-28484 | CCAGTATAAGCCCCACCTTG | 24 |
| GD-28485 | CTGCCTGTCCCATAAGGAGG | 25 |
| GD-28486 | GCACTGCCTGTCCCATAAGG | 26 |
| GD-28487 | GGTCCTCCTCCTTATGGGAC | 27 |
| GD-28488 | GCCTTGTTTTCGGCTCTAGA | 28 |
| GD-28489 | GCCATCTAGAGCCGAAAACA | 29 |
| GD-29251 | CCAATGAAGATGAAACTGGG | 30 |
| GD-29252 | AACGTGCTTGCCTAAGATTC | 31 |
| GD-29253 | AGCCCTTAATCATATCTAGT | 32 |
| GD-29254 | CAGAGCTTAAGACCTGTACT | 33 |
| GD-29255 | GCCCACCTTGACCTTCACAA | 34 |

In some embodiments, a targeting moiety comprises a nucleic acid comprising a sequence selected from Table 6 or a sequence having at least 70, 75, 80, 85, 90, 91, 92, 93, 94, 95, 96, 97, 98, or 99% identity thereto, or differing at no more than 1, 2, 3, 4, or 5 positions relative thereto.

TABLE 6
Exemplary guide sequence

| | | | Genomic |
|---|---|---|---|
| Guide | Sequence | Strand | Coordinate |
| GD-30178 | GTTACTGCGTAATTACCAGG | + | GRCh37: |
| | (SEQ ID NO: 35) | | chr4: |
| | | | 74528428- |
| | | | 74528450 |
| GD-30179 | TATTACATCCTACCTATAAG | + | GRCh37: |
| | (SEQ ID NO: 36) | | chr4: |
| | | | 74528567- |
| | | | 74528589 |
| GD-30180 | TGGGCTCTGGACTTAGATCG | + | GRCh37: |
| | (SEQ ID NO: 37) | | chr4: |
| | | | 74528609- |
| | | | 74528631 |
| GD-30181 | TAAGTGGGCTATGTATACAC | + | GRCh37: |
| | (SEQ ID NO: 38) | | chr4: |
| | | | 74789132- |
| | | | 74789154 |
| GD-30182 | TTTCTAAGTCTGTCACAAGG | − | GRCh37: |
| | (SEQ ID NO: 39) | | chr4: |
| | | | 74789250- |
| | | | 74789272 |
| GD-30183 | AAAGTAATATGATCTAGGAA | − | GRCh37: |
| | (SEQ ID NO: 40) | | chr4: |
| | | | 74789312- |
| | | | 74789334 |
| GD-30184 | GTTCGAGCGGCTGTGCGAGG | + | GRCh37: |
| | (SEQ ID NO: 41) | | chr4: |
| | | | 74964853- |
| | | | 74964875 |
| GD-30185 | GCTCTGTGGCTCTCCGAGAA | + | GRCh37: |
| | (SEQ ID NO: 42) | | chr4: |
| | | | 74964906- |
| | | | 74964928 |
| GD-30186 | GTGTGTGTGTTTCAACGTAG | + | GRCh37: |
| | (SEQ ID NO: 43) | | chr4: |
| | | | 74965538- |
| | | | 74965560 |
| GD-30187 | GGAAGTCACTGGGAGCTGCG | + | GRCh37: |
| | (SEQ ID NO: 44) | | chr4: |
| | | | 74965737- |
| | | | 74965759 |
| GD-30200 | GGCCACGGGTGTGTTCCCAG | − | GRCh37: |
| | (SEQ ID NO: 45) | | chr4: |
| | | | 75000031- |
| | | | 75000053 |
| GD-30201 | ATGGCCATTTGCAAAAGTCA | + | GRCh37: |
| | (SEQ ID NO: 46) | | chr4: |
| | | | 75000115- |
| | | | 75000137 |
| GD-30202 | CCAAACTAGACAGATAAAGC | + | GRCh37: |
| | (SEQ ID NO: 47) | | chr4: |
| | | | 75000231- |
| | | | 75000253 |
| GD-30203 | CCAGCATGACTCTAGCATGC | − | GRCh37: |
| | (SEQ ID NO: 48) | | chr4: |
| | | | 74975146- |
| | | | 74975168 |
| GD-30204 | TGGCCAAGGTCTGATATGCA | + | GRCh37: |
| | (SEQ ID NO: 49) | | chr4: |
| | | | 74975369- |
| | | | 74975391 |
| GD-30205 | TCATGAGTCCCAGAACATGT | − | GRCh37: |
| | (SEQ ID NO: 50) | | chr4: |
| | | | 74976318- |
| | | | 74976340 |
| GD-30206 | GCGAAAGAAGTAGTAGCTAA | − | GRCh37: |
| | (SEQ ID NO: 51) | | chr4: |
| | | | 74570348- |
| | | | 74570370 |
| GD-30207 | GACTAAGACTGGCAAATCTG | − | GRCh37: |
| | (SEQ ID NO: 52) | | chr4: |
| | | | 74570503- |
| | | | 74570525 |
| GD-30208 | GACTAAGAGGAGCCGACATG | + | GRCh37: |
| | (SEQ ID NO: 53) | | chr4: |
| | | | 74570526- |
| | | | 74570548 |
| GD-30238 | GAAAAACGGGTGTTGTGACG | + | GRCm38: |
| | (SEQ ID NO: 54) | | chr5: |
| | | | 90661492- |
| | | | 90661514 |
| GD-30239 | TTTGTGAACTAAGGATTCTG | − | GRCm38: |
| | (SEQ ID NO: 55) | | chr5: |
| | | | 90661646- |
| | | | 90661668 |
| GD-30240 | GTCCGTGTAGAGTTACCATG | + | GRCm38: |
| | (SEQ ID NO: 56) | | chr5: |
| | | | 90661744- |
| | | | 90661766 |
| GD-30241 | GATGTATTCACAAGAGGACT | + | GRCm38: |
| | | | chr5: |
| | | | 90785610- |
| | (SEQ ID NO: 57) | | 90785632 |
| GD-30242 | AATTACTACCTCATAGCTAG | − | GRCm38: |
| | (SEQ ID NO: 58) | | chr5: |
| | | | 90909047- |
| | | | 90909069 |
| GD-30592 | GAAGGTAGAAATCCGCCACT | | GRCm38: |
| | (SEQ ID NO: 59) | | chr5: |
| | | | 90785724- |
| | | | 90785746 |
| GD-30593 | GAAACGCCGAGGTAACTCAT | | GRCm38: |
| | (SEQ ID NO: 60) | | chr5: |
| | | | 90788137- |
| | | | 90788159 |
| GD-30594 | CAACTAAAATTTCTAGCCCT | | GRCm38: |
| | (SEQ ID NO: 61) | | chr5: |
| | | | 90908926- |
| | | | 90908948 |
| GD-28044 | GACTCCAGTCTTTCTAGAAGA | | GRCm38: |
| | (SEQ ID NO: 62) | | chr6: |
| | | | 113076028- |
| | | | 113076047 |

[0133] In some embodiments, a targeting moiety comprises a nucleic acid comprising a sequence that is complementary to the sequence of an anchor sequence, e.g., of an ASMC comprising the target plurality of genes, or having no more than 1, 2, 3, 4, 5, 6, 7, 8, 9, or 10 positions of non-complementarity thereto.

[0134] In some embodiments, a targeting moiety comprises a nucleic acid comprising a sequence that at least partially overlapping with the region having genomic coordinates chr4:74595464-74595486, chr4:74595457-74595479, chr4:74595460-74595482, chr4:74595472-74595494, chr4:75000088-75000110, chr4:75000091-75000113, chr4:75000085-75000107, chr4:75000157-75000179, chr4:75000156-75000178, chr4:74595215-74595237, chr4:74595370-74595392, chr4:74595560-74595582, chr4:74595642-74595664, chr4:74595787-74595809, chr4:74528428-74528450, chr4:74528567-74528589, chr4:74528609-74528631, chr4:74789132-74789154, chr4:74789250-74789272, chr4:74789312-74789334, chr4:74964853-74964875, chr4:74964906-74964928, chr4:74965538-74965560, chr4:74965737-74965759, chr4:75000031-75000053, chr4:75000115-75000137, chr4:75000231-75000253, chr4:74975146-74975168, chr4:74975369-74975391, chr4:74976318-74976340, chr4:74570348-74570370, chr4:74570503-74570525, chr4:74570526-74570548, chr5:90785724-90785746, chr5:90788137-90788159, chr5:90908926-90908948, chr5:90661492-90661514, chr5:90661646-90661668, chr5:90661744-90661766, chr5:90785610-90785632, chr5:90909047-90909069, or chr6:113076028-113076047 or a sequence that is within 5, 10, 15, 20, 30, 40, or 50 nucleotides of said region, or comprises a sequence having at least 70, 75, 80, 85, 90, 91, 92, 93, 94, 95, 96, 97, 98, or 99% identity to a sequence at said genomic region, or differing at no more than 1, 2, 3, 4, or 5 positions relative thereto.

[0135] In some embodiments, a targeting moiety binds to a sequence at genomic positions chr4:74595464-74595486, chr4:74595457-74595479, chr4:74595460-74595482, chr4:74595472-74595494, chr4:75000088-75000110, chr4:75000091-75000113, chr4:75000085-75000107, chr4:75000157-75000179, chr4:75000156-75000178, chr4:74595215-74595237, chr4:74595370-74595392, chr4:74595560-74595582, chr4:74595642-74595664, chr4:74595787-74595809, chr4:74528428-74528450, chr4:74528567-74528589, chr4:74528609-74528631, chr4:74789132-74789154, chr4:74789250-74789272, chr4:74789312-74789334, chr4:74964853-74964875, chr4:74964906-74964928, chr4:74965538-74965560, chr4:74965737-74965759, chr4:75000031-75000053, chr4:75000115-75000137, chr4:75000231-75000253, chr4:74975146-74975168, chr4:74975369-74975391, chr4:74976318-74976340, chr4:74570348-74570370, chr4:74570503-74570525, chr4:74570526-74570548, chr5:90661492-90661514, chr5:90661646-90661668, chr5:90661744-90661766, chr5:90785610-90785632, chr5:90909047-90909069, chr5:90785724-90785746, chr5:90788137-90788159, chr5:90908926-90908948, or chr6:113076028-113076047.

[0136] In some embodiments, a targeting moiety binds to an anchor sequence or to a site proximal to an anchor sequence, e.g., an anchor sequence that is part of an ASMC comprising, wholly or in part, a target plurality of genes.

[0137] In some embodiments, a targeting moiety comprises a CRISPR/Cas molecule. In some embodiments, an effector moiety comprises a CRISPR/Cas molecule. A CRISPR/Cas molecule comprises a protein involved in the clustered regulatory interspaced short palindromic repeat (CRISPR) system, e.g., a Cas protein, and optionally a guide RNA, e.g., single guide RNA (sgRNA).

[0138] CRISPR systems are adaptive defense systems originally discovered in bacteria and archaea. CRISPR systems use RNA-guided nucleases termed CRISPR-associated or “Cas” endonucleases (e. g., Cas9 or Cpf1) to cleave foreign DNA. For example, in a typical CRISPR/Cas system, an endonuclease is directed to a target nucleotide sequence (e. g., a site in the genome that is to be sequence-edited) by sequence-specific, non-coding “guide RNAs” that target single- or double-stranded DNA sequences. Three classes (I-III) of CRISPR systems have been identified. The class II CRISPR systems use a single Cas endonuclease (rather than multiple Cas proteins). One class II CRISPR system includes a type II Cas endonuclease such as Cas9, a CRISPR RNA (“crRNA”), and a trans-activating crRNA (“tracrRNA”). The crRNA contains a “guide RNA”, typically about 20-nucleotide RNA sequence that corresponds to a target DNA sequence. crRNA also contains a region that binds to the tracrRNA to form a partially double-stranded structure which is cleaved by RNase III, resulting in a crRNA/tracrRNA hybrid. A crRNA/tracrRNA hybrid then directs Cas9 endonuclease to recognize and cleave a target DNA sequence. A target DNA sequence must generally be adjacent to a “protospacer adjacent motif” (“PAM”) that is specific for a given Cas endonuclease; however, PAM sequences appear throughout a given genome. CRISPR endonucleases identified from various prokaryotic species have unique PAM sequence requirements; examples of PAM sequences include 5′-NGG (Streptococcus pyogenes), 5′-NNAGAA (Streptococcus thermophilus CRISPRI), 5′-NGGNG (Streptococcus thermophilus CRISPR3), and 5′-NNNGATT (Neisseria meningitidis). Some endonucleases, e.g., Cas9 endonucleases, are associated with G-rich PAM sites, e. g., 5′-NGG (e.g., TGG, e.g., CGG, e.g., AGG), and perform blunt-end cleaving of the target DNA at a location 3 nucleotides upstream from (5′ from) the PAM site. Another class II CRISPR system includes the type V endonuclease Cpf1, which is smaller than Cas9; examples include AsCpf1 (from Acidaminococcus sp.) and LbCpfl (from Lachnospiraceae sp.). Cpf1-associated CRISPR arrays are processed into mature crRNAs without the requirement of a tracrRNA; in other words, a Cpf1 system requires only Cpf1 nuclease and a crRNA to cleave a target DNA sequence. Cpf1 endonucleases, are associated with T-rich PAM sites, e. g., 5′-TTN. Cpf1 can also recognize a 5′-CTA PAM motif. Cpf1 cleaves a target DNA by introducing an offset or staggered double-strand break with a 4- or 5-nucleotide 5′ overhang, for example, cleaving a target DNA with a 5-nucleotide offset or staggered cut located 18 nucleotides downstream from (3′ from) from a PAM site on the coding strand and 23 nucleotides downstream from the PAM site on the complimentary strand; the 5-nucleotide overhang that results from such offset cleavage allows more precise genome editing by DNA insertion by homologous recombination than by insertion at blunt-end cleaved DNA. See, e.g., Zetsche et al. (2015) Cell, 163:759-771.

[0139] A variety of CRISPR associated (Cas) genes or proteins can be used in the technologies provided by the present disclosure and the choice of Cas protein will depend upon the particular conditions of the method. Specific examples of Cas proteins include class II systems including Cas1, Cas2, Cas3, Cas4, Cas5, Cas6, Cas7, Cas8, Cas9, Cas10, Cpf1, C2C1, or C2C3. In some embodiments, a Cas protein, e.g., a Cas9 protein, may be from any of a variety of prokaryotic species. In some embodiments a particular Cas protein, e.g., a particular Cas9 protein, is selected to recognize a particular protospacer-adjacent motif (PAM) sequence. In some embodiments, a targeting moiety includes a sequence targeting polypeptide, such as a Cas protein, e.g., Cas9. In certain embodiments a Cas protein, e.g., a Cas9 protein, may be obtained from a bacteria or archaea or synthesized using known methods. In certain embodiments, a Cas protein may be from a gram positive bacteria or a gram negative bacteria. In certain embodiments, a Cas protein may be from a Streptococcus (e.g., a S. pyogenes, or a S. thermophilus), a Francisella (e.g., an F. novicida), a Staphylococcus (e.g., an S. aureus), an Acidaminococcus (e.g., an Acidaminococcus sp. BV3L6), a Neisseria (e.g., an N. meningitidis), a Cryptococcus, a Corynebacterium, a Haemophilus, a Eubacterium, a Pasteurella, a Prevotella, a Veillonella, or a Marinobacter.

[0140] In some embodiments, a Cas protein requires a protospacer adjacent motif (PAM) to be present in or adjacent to a target DNA sequence for the Cas protein to bind and/or function. In some embodiments, the PAM is or comprises, from 5′ to 3′, NGG, YG, NNGRRT, NNNRRT, NGA, TYCV, TATV, NTTN, or NNNGATT, where N stands for any nucleotide, Y stands for C or T, R stands for A or G, and V stands for A or C or G. In some embodiments, a Cas protein is a protein listed in Table 1. In some embodiments, a Cas protein comprises one or more mutations altering its PAM. In some embodiments, a Cas protein comprises E1369R, E1449H, and R1556A mutations or analogous substitutions to the amino acids corresponding to said positions. In some embodiments, a Cas protein comprises E782K, N968K, and R1015H mutations or analogous substitutions to the amino acids corresponding to said positions. In some embodiments, a Cas protein comprises D1135V, R1335Q, and T1337R mutations or analogous substitutions to the amino acids corresponding to said positions. In some embodiments, a Cas protein comprises S542R and K607R mutations or analogous substitutions to the amino acids corresponding to said positions. In some embodiments, a Cas protein comprises S542R, K548V, and N552R mutations or analogous substitutions to the amino acids corresponding to said positions.

TABLE 1

| | | | # of | | Mutations to alter | Mutations to make |
|---|---|---|---|---|---|---|
| Name | Enzyme | Species | AAs | PAM | PAM recognition | catalytically dead |
| FnCas9 | Cas9 | Francisella | 1629 | 5′-NGG-3′ | Wt | D11A/H969A/ |
| | | novicida | | | | N995A |
| FnCas9 | Cas9 | Francisella | 1629 | 5′-YG-3′ | E1369R/E1449H/R1556A | D11A/H969A/ |
| RHA | | novicida | | | | N995A |
| SaCas9 | Cas9 | Staphylococcus | 1053 | 5′-NNGRRT-3′ | Wt | D10A/H557A |
| | | aureus | | | | |
| SaCas9 | Cas9 | Staphylococcus | 1053 | 5′-NNNRRT-3′ | E782K/N968K/R1015H | D10A/H557A |
| KKH | | aureus | | | | |
| SpCas9 | Cas9 | Streptococcus | 1368 | 5′-NGG-3′ | Wt | D10A/D839A/ |
| | | pyogenes | | | | H840A/N863A |
| SpCas9 | Cas9 | Streptococcus | 1368 | 5′-NGA-3′ | D1135V/R1335Q/T1337R | D10A/D839A/ |
| VQR | | pyogenes | | | | H840A/N863A |
| AsCpf1 | Cpf1 | Acidaminococcus | 1307 | 5′-TYCV-3′ | S542R/K607R | E993A |
| RR | | sp. BV3L6 | | | | |
| AsCpf1 | Cpf1 | Acidaminococcus | 1307 | 5′-TATV-3′ | S542R/K548V/N552R | E993A |
| RVR | | sp. BV3L6 | | | | |
| FnCpf1 | Cpf1 | Francisella | 1300 | 5′-NTTN-3′ | Wt | D917A/E1006A/ |
| | | novicida | | | | D1255A |
| NmCas9 | Cas9 | Neisseria | 1082 | 5′-NNNGATT-3′ | Wt | D16A/D587A/ |
| | | meningitidis | | | | H588A/N611A |

[0141] In some embodiments, the Cas protein is catalytically active and cuts one or both strands of the target DNA site. In some embodiments, cutting the target DNA site is followed by formation of an alteration, e.g., an insertion or deletion, e.g., by the cellular repair machinery.

[0142] In some embodiments, the Cas protein is modified to deactivate the nuclease, e.g., nuclease-deficient Cas9. Whereas wild-type Cas9 generates double-strand breaks (DSBs) at specific DNA sequences targeted by a gRNA, a number of CRISPR endonucleases having modified functionalities are available, for example: a “nickase” version of Cas9 generates only a single-strand break; a catalytically inactive Cas9 (“dCas9”) does not cut target DNA. In some embodiments, dCas9 binding to a DNA sequence may interfere with transcription at that site by steric hindrance. In some embodiments, dCas9 binding to an anchor sequence may interfere with (e.g., decrease or prevent) genomic complex (e.g., ASMC) formation and/or maintenance. In some embodiments, a targeting moiety comprises a catalytically inactive Cas9, e.g., dCas9, e.g., Cas9m4. Many catalytically inactive Cas9 proteins are known in the art. In some embodiments, dCas9 comprises mutations in each endonuclease domain of the Cas protein, e.g., D10A and H840A mutations.

[0143] In some embodiments, a catalytically inactive Cas9 protein, e.g., dCas9, comprises a D11A mutation or an analogous substitution to the amino acid corresponding to said position. In some embodiments, a catalytically inactive Cas9 protein, e.g., dCas9, comprises a H969A mutation or an analogous substitution to the amino acid corresponding to said position. In some embodiments, a catalytically inactive Cas9 protein, e.g., dCas9, comprises a N995A mutation or an analogous substitution to the amino acid corresponding to said position. In some embodiments, a catalytically inactive Cas9 protein, e.g., dCas9, comprises D11A, H969A, and N995A mutations or analogous substitutions to the amino acids corresponding to said positions.

[0144] In some embodiments, a catalytically inactive Cas9 protein, e.g., dCas9, comprises a D10A mutation or an analogous substitution to the amino acid corresponding to said position. In some embodiments, a catalytically inactive Cas9 protein, e.g., dCas9, comprises a H557A mutation or an analogous substitution to the amino acid corresponding to said position. In some embodiments, a catalytically inactive Cas9 protein, e.g., dCas9, comprises D10A and H557A mutations or analogous substitutions to the amino acids corresponding to said positions.

[0145] In some embodiments, a catalytically inactive Cas9 protein, e.g., dCas9, comprises a D839A mutation or an analogous substitution to the amino acid corresponding to said position. In some embodiments, a catalytically inactive Cas9 protein, e.g., dCas9, comprises a H840A mutation or an analogous substitution to the amino acid corresponding to said position. In some embodiments, a catalytically inactive Cas9 protein, e.g., dCas9, comprises a N863A mutation or an analogous substitution to the amino acid corresponding to said position. In some embodiments, a catalytically inactive Cas9 protein, e.g., dCas9, comprises D10A, D839A, H840A, and N863A mutations or analogous substitutions to the amino acids corresponding to said positions.

[0146] In some embodiments, a catalytically inactive Cas9 protein, e.g., dCas9, comprises a E993A mutation or an analogous substitution to the amino acid corresponding to said position.

[0147] In some embodiments, a catalytically inactive Cas9 protein, e.g., dCas9, comprises a D917A mutation or an analogous substitution to the amino acid corresponding to said position. In some embodiments, a catalytically inactive Cas9 protein, e.g., dCas9, comprises a E1006A mutation or an analogous substitution to the amino acid corresponding to said position. In some embodiments, a catalytically inactive Cas9 protein, e.g., dCas9, comprises a D1255A mutation or an analogous substitution to the amino acid corresponding to said position. In some embodiments, a catalytically inactive Cas9 protein, e.g., dCas9, comprises D917A, E1006A, and D1255A mutations or analogous substitutions to the amino acids corresponding to said positions.

[0148] In some embodiments, a catalytically inactive Cas9 protein, e.g., dCas9, comprises a D16A mutation or an analogous substitution to the amino acid corresponding to said position. In some embodiments, a catalytically inactive Cas9 protein, e.g., dCas9, comprises a D587A mutation or an analogous substitution to the amino acid corresponding to said position. In some embodiments, a catalytically inactive Cas9 protein, e.g., dCas9, comprises a H588A mutation or an analogous substitution to the amino acid corresponding to said position. In some embodiments, a catalytically inactive Cas9 protein, e.g., dCas9, comprises a N611A mutation or an analogous substitution to the amino acid corresponding to said position. In some embodiments, a catalytically inactive Cas9 protein, e.g., dCas9, comprises D16A, D587A, H588A, and N611A mutations or analogous substitutions to the amino acids corresponding to said positions.

[0149] In some aspects, a system described herein comprises, or a method described herein comprises the use of, a site-specific disrupting agent or a polypeptide comprising one or more (e.g., one) targeting moiety and one or more effector moieties (e.g., one or two effector moieties), wherein the one or more targeting moiety is or comprises a CRISPR/Cas molecule comprising a Cas protein, e.g., catalytically inactive Cas9 protein, e.g., sadCas9, dCas9, e.g., dCas9m4, or a functional variant or fragment thereof. In some embodiments, dCas9 comprises an amino acid sequence of SEQ ID NO: 5, 6, or 7:

Cas9
(SEQ ID NO: 5)
DKKYSIGLDIGTNSVGWAVITDEYKVPSKKFKVLGNTDRH
SIKKNLIGALLFDSGETAEATRLKRTARRRYTRRKNRICY
LQEIFSNEMAKVDDSFFHRLEESFLVEEDKKHERHPIFGN
IVDEVAYHEKYPTIYHLRKKLVDSTDKADLRLIYLALAHM
IKFRGHFLIEGDLNPDNSDVDKLFIQLVQTYNQLFEENPI
NASGVDAKAILSARLSKSRRLENLIAQLPGEKKNGLFGNL
IALSLGLTPNFKSNFDLAEDAKLQLSKDTYDDDLDNLLAQ
IGDQYADLFLAAKNLSDAILLSDILRVNTEITKAPLSASM
IKRYDEHHQDLTLLKALVRQQLPEKYKEIFFDQSKNGYAG
YIDGGASQEEFYKFIKPILEKMDGTEELLVKLNREDLLRK
QRTFDNGSIPHQIHLGELHAILRRQEDFYPFLKDNREKIE
KILTFRIPYYVGPLARGNSRFAWMTRKSEETITPWNFEEV
VDKGASAQSFIERMTNFDKNLPNEKVLPKHSLLYEYFTVY
NELTKVKYVTEGMRKPAFLSGEQKKAIVDLLFKTNRKVTV
KQLKEDYFKKIECFDSVEISGVEDRFNASLGTYHDLLKII
KDKDFLDNEENEDILEDIVLTLTLFEDREMIEERLKTYAH
LFDDKVMKQLKRRRYTGWGRLSRKLINGIRDKQSGKTILD
FLKSDGFANRNFMQLIHDDSLTFKEDIQKAQVSGQGDSLH
EHIANLAGSPAIKKGILQTVKVVDELVKVMGRHKPENIVI
EMARENQTTQKGQKNSRERMKRIEEGIKELGSQILKEHPV
ENTQLQNEKLYLYYLQNGRDMYVDQELDINRLSDYDVDHI
VPQSFLKDDSIDNKVLTRSDKNRGKSDNVPSEEVVKKMKN
YWRQLLNAKLITQRKFDNLTKAERGGLSELDKAGFIKRQL
VETRQITKHVAQILDSRMNTKYDENDKLIREVKVITLKSK
LVSDFRKDFQFYKVREINNYHHAHDAYLNAVVGTALIKKY
PKLESEFVYGDYKVYDVRKMIAKSEQEIGKATAKYFFYSN
IMNFFKTEITLANGEIRKRPLIETNGETGEIVWDKGRDFA
TVRKVLSMPQVNIVKKTEVQTGGFSKESILPKRNSDKLIA
RKKDWDPKKYGGFDSPTVAYSVLVVAKVEKGKSKKLKSVK
ELLGITIMERSSFEKNPIDFLEAKGYKEVKKDLIIKLPKY
SLFELENGRKRMLASAGELQKGNELALPSKYVNFLYLASH
YEKLKGSPEDNEQKQLFVEQHKHYLDEIIEQISEFSKRVI
LADANLDKVLSAYNKHRDKPIREQAENIIHLFTLTNLGAP
AAFKYFDTTIDRKRYTSTKEVLDATLIHQSITGLYETRID
LSQLGGD
dCas9 (Cas9m4)
(SEQ ID NO: 6)
DKKYSIGLAIGTNSVGWAVITDEYKVPSKKFKVLGNTDRH
SIKKNLIGALLFDSGETAEATRLKRTARRRYTRRKNRICY
LQEIFSNEMAKVDDSFFHRLEESFLVEEDKKHERHPIFGN
IVDEVAYHEKYPTIYHLRKKLVDSTDKADLRLIYLALAHM
IKFRGHFLIEGDLNPDNSDVDKLFIQLVQTYNQLFEENPI
NASGVDAKAILSARLSKSRRLENLIAQLPGEKKNGLFGNL
IALSLGLTPNFKSNFDLAEDAKLQLSKDTYDDDLDNLLAQ
IGDQYADLFLAAKNLSDAILLSDILRVNTEITKAPLSASM
IKRYDEHHQDLTLLKALVRQQLPEKYKEIFFDQSKNGYAG
YIDGGASQEEFYKFIKPILEKMDGTEELLVKLNREDLLRK
QRTFDNGSIPHQIHLGELHAILRRQEDFYPFLKDNREKIE
KILTFRIPYYVGPLARGNSRFAWMTRKSEETITPWNFEEV
VDKGASAQSFIERMTNFDKNLPNEKVLPKHSLLYEYFTVY
NELTKVKYVTEGMRKPAFLSGEQKKAIVDLLFKTNRKVTV
KQLKEDYFKKIECFDSVEISGVEDRFNASLGTYHDLLKII
KDKDFLDNEENEDILEDIVLTLTLFEDREMIEERLKTYAH
LFDDKVMKQLKRRRYTGWGRLSRKLINGIRDKQSGKTILD
FLKSDGFANRNFMQLIHDDSLTFKEDIQKAQVSGQGDSLH
EHIANLAGSPAIKKGILQTVKVVDELVKVMGRHKPENIVI
EMARENQTTQKGQKNSRERMKRIEEGIKELGSQILKEHPV
ENTQLQNEKLYLYYLQNGRDMYVDQELDINRLSDYDVAAI
VPQSFLKDDSIDNKVLTRSDKARGKSDNVPSEEVVKKMKN
YWRQLLNAKLITQRKFDNLTKAERGGLSELDKAGFIKRQL
VETRQITKHVAQILDSRMNTKYDENDKLIREVKVITLKSK
LVSDFRKDFQFYKVREINNYHHAHDAYLNAVVGTALIKKY
PKLESEFVYGDYKVYDVRKMIAKSEQEIGKATAKYFFYSN
IMNFFKTEITLANGEIRKRPLIETNGETGEIVWDKGRDFA
TVRKVLSMPQVNIVKKTEVQTGGFSKESILPKRNSDKLIA
RKKDWDPKKYGGFDSPTVAYSVLVVAKVEKGKSKKLKSVK
ELLGITIMERSSFEKNPIDFLEAKGYKEVKKDLIIKLPKY
SLFELENGRKRMLASAGELQKGNELALPSKYVNFLYLASH
YEKLKGSPEDNEQKQLFVEQHKHYLDEIIEQISEFSKRVI
LADANLDKVLSAYNKHRDKPIREQAENIIHLFTLTNLGAP
AAFKYFDTTIDRKRYTSTKEVLDATLIHQSITGLYETRID
LSQLGGD
Sa-dCas9
(SEQ ID NO: 7)
AKRNYILGLAIGITSVGYGIIDYETRDVIDAGVRLFKEAN
VENNEGRRSKRGARRLKRRRRHRIQRVKKLLFDYNLLTDH
SELSGINPYEARVKGLSQKLSEEEFSAALLHLAKRRGVHN
VNEVEEDTGNELSTKEQISRNSKALEEKYVAELQLERLKK
DGEVRGSINRFKTSDYVKEAKQLLKVQKAYHQLALNDLNN
LVITRDENEKLEYYEKFQUIENVFKQKKKPTLKQIAKEIL
VNEEDIKGYRVTSTGKPEFTNLKVYHDIKDITARKEIIEN
AELLDQIAKILTIYQSSEDIQEELTNLNSELTQEEIEQIS
NLKGYTGTHNLSLKAINLILDELWHTNDNQIAIFNRLKLV
PKKVDLSQQKEIPTTLVDDFILSPVVKRSFIQSIKVINAI
IKKYGLPNDIIIELAREKNSKDAQKMINEMQKRNRQTNER
IEEIIRTTGKENAKYLIEKIKLHDMQEGKCLYSLEAIPLE
DLLNNPFNYEVDAIIPRSVSFDNSFNNKVLVKQEENSKKG
NRTPFQYLSSSDSKISYETFKKHILNLAKGKGRISKTKKE
YLLEERDINRFSVQKDFINRNLVDTRYATRGLMNLLRSYF
RVNNLDVKVKSINGGFTSFLRRKWKFKKERNKGYKHHAED
ALIIANADFIFKEWKKLDKAKKVMENQMFEEKQAESMPEI
ETEQEYKEIFITPHQIKHIKDFKDYKYSHRVDKKPNRKLI
NDTLYSTRKDDKGNTLIVNNLNGLYDKDNDKLKKLINKSP
EKLLMYHHDPQTYQKLKLIMEQYGDEKNPLYKYYEETGNY
LTKYSKKDNGPVIKKIKYYGNKLNAHLDITDDYPNSRNKV
VKLSLKPYRFDVYLDNGVYKFVTVKNLDVIKKENYYEVNS
KCYEEAKKLKKISNQAEFIASFYKNDLIKINGELYRVIGV
NNDLLNRIEVNMIDITYREYLENMNDKRPPHIIKTIASKT
QSIKKYSTDILGNLYEVKSKKHPQIIKKG

In some embodiments, the dCas9 is encoded by a nucleic acid sequence of SEQ ID NO: 8, or 9:

(SEQ ID NO: 8)
GACAAGAAGTACAGCATCGGCCTGGCCATCGGCACCAACAGCGTGGGCTGGGCCGTGATCA
CCGACGAGTACAAGGTGCCCAGCAAGAAGTTCAAGGTGCTGGGCAACACCGACCGGCACAG
CATCAAGAAGAACCTGATCGGCGCCCTGCTGTTCGACAGCGGCGAGACCGCCGAGGCCACC
CGGCTGAAGCGGACCGCCCGGCGGCGGTACACCCGGCGGAAGAACCGGATCTGCTACCTGC
AGGAGATCTTCAGCAACGAGATGGCCAAGGTGGACGACAGCTTCTTCCACCGGCTGGAGGA
GAGCTTCCTGGTGGAGGAGGACAAGAAGCACGAGCGGCACCCCATCTTCGGCAACATCGTG
GACGAGGTGGCCTACCACGAGAAGTACCCCACCATCTACCACCTGCGGAAGAAGCTGGTGG
ACAGCACCGACAAGGCCGACCTGCGGCTGATCTACCTGGCCCTGGCCCACATGATCAAGTTC
CGGGGCCACTTCCTGATCGAGGGCGACCTGAACCCCGACAACAGCGACGTGGACAAGCTGT
TCATCCAGCTGGTGCAGACCTACAACCAGCTGTTCGAGGAGAACCCCATCAACGCCAGCGG
CGTGGACGCCAAGGCCATCCTGAGCGCCCGGCTGAGCAAGAGCCGGCGGCTGGAGAACCTG
ATCGCCCAGCTGCCCGGCGAGAAGAAGAACGGCCTGTTCGGCAACCTGATCGCCCTGAGCC
TGGGCCTGACCCCCAACTTCAAGAGCAACTTCGACCTGGCCGAGGACGCCAAGCTGCAGCT
GAGCAAGGACACCTACGACGACGACCTGGACAACCTGCTGGCCCAGATCGGCGACCAGTAC
GCCGACCTGTTCCTGGCCGCCAAGAACCTGAGCGACGCCATCCTGCTGAGCGACATCCTGCG
GGTGAACACCGAGATCACCAAGGCCCCCCTGAGCGCCAGCATGATCAAGCGGTACGACGAG
CACCACCAGGACCTGACCCTGCTGAAGGCCCTGGTGCGGCAGCAGCTGCCCGAGAAGTACA
AGGAGATCTTCTTCGACCAGAGCAAGAACGGCTACGCCGGCTACATCGACGGCGGCGCCAG
CCAGGAGGAGTTCTACAAGTTCATCAAGCCCATCCTGGAGAAGATGGACGGCACCGAGGAG
CTGCTGGTGAAGCTGAACCGGGAGGACCTGCTGCGGAAGCAGCGGACCTTCGACAACGGCA
GCATCCCCCACCAGATCCACCTGGGCGAGCTGCACGCCATCCTGCGGCGGCAGGAGGACTTC
TACCCCTTCCTGAAGGACAACCGGGAGAAGATCGAGAAGATCCTGACCTTCCGGATCCCCTA
CTACGTGGGCCCCCTGGCCCGGGGCAACAGCCGGTTCGCCTGGATGACCCGGAAATCCGAG
GAGACCATCACCCCCTGGAACTTCGAGGAGGTGGTGGACAAGGGCGCCAGCGCCCAGAGCT
TCATCGAGCGGATGACCAACTTCGACAAGAACCTGCCCAACGAGAAGGTGCTGCCCAAGCA
CAGCCTGCTGTACGAGTACTTCACCGTGTACAACGAGCTGACCAAGGTGAAGTACGTGACCG
AGGGCATGCGGAAGCCCGCCTTCCTGAGCGGCGAGCAGAAGAAGGCCATCGTGGACCTGCT
GTTCAAGACCAACCGGAAGGTGACCGTGAAGCAGCTGAAGGAGGACTACTTCAAGAAGATC
GAGTGCTTCGACAGCGTGGAGATCAGCGGCGTGGAGGACCGGTTCAACGCCAGCCTGGGCA
CCTACCACGACCTGCTGAAGATCATCAAGGACAAGGACTTCCTGGACAACGAGGAGAACGA
GGACATCCTGGAGGACATCGTGCTGACCCTGACCCTGTTCGAGGACCGGGAGATGATCGAG
GAGCGGCTGAAAACCTACGCCCACCTGTTCGACGACAAGGTGATGAAGCAGCTGAAGCGGC
GGCGGTACACCGGCTGGGGCCGGCTGAGCCGGAAGCTGATCAACGGCATCCGGGACAAGCA
GAGCGGCAAGACCATCCTGGACTTCCTGAAATCCGACGGCTTCGCCAACCGGAACTTCATGC
AGCTGATCCACGACGACAGCCTGACCTTCAAGGAGGACATCCAGAAGGCCCAGGTGAGCGG
CCAGGGCGACAGCCTGCACGAGCACATCGCCAACCTGGCCGGCAGCCCCGCCATCAAGAAG
GGCATCCTGCAGACCGTGAAGGTGGTGGACGAGCTGGTGAAGGTGATGGGCCGGCACAAGC
CCGAGAACATCGTGATCGAGATGGCCCGGGAGAACCAGACCACCCAGAAGGGCCAGAAGA
ACAGCCGGGAGCGGATGAAGCGGATCGAGGAGGGCATCAAGGAGCTGGGCAGCCAGATCC
TGAAGGAGCACCCCGTGGAGAACACCCAGCTGCAGAACGAGAAGCTGTACCTGTACTACCT
GCAGAACGGCCGGGACATGTACGTGGACCAGGAGCTGGACATCAACCGGCTGAGCGACTAC
GACGTGGCCGCCATCGTGCCCCAGAGCTTCCTGAAGGACGACAGCATCGACAACAAGGTGC
TGACCCGGAGCGACAAGGCCCGGGGCAAGAGCGACAACGTGCCCAGCGAGGAGGTGGTGA
AGAAGATGAAGAACTACTGGCGGCAGCTGCTGAACGCCAAGCTGATCACCCAGCGGAAGTT
CGACAACCTGACCAAGGCCGAGCGGGGCGGCCTGAGCGAGCTGGACAAGGCCGGCTTCATC
AAGCGGCAGCTGGTGGAGACCCGGCAGATCACCAAGCACGTGGCCCAGATCCTGGACAGCC
GGATGAACACCAAGTACGACGAGAACGACAAGCTGATCCGGGAGGTGAAGGTGATCACCCT
GAAATCCAAGCTGGTGAGCGACTTCCGGAAGGACTTCCAGTTCTACAAGGTGCGGGAGATC
AACAACTACCACCACGCCCACGACGCCTACCTGAACGCCGTGGTGGGCACCGCCCTGATCA
AGAAGTACCCCAAGCTGGAGAGCGAGTTCGTGTACGGCGACTACAAGGTGTACGACGTGCG
GAAGATGATCGCCAAGAGCGAGCAGGAGATCGGCAAGGCCACCGCCAAGTACTTCTTCTAC
AGCAACATCATGAACTTCTTCAAGACCGAGATCACCCTGGCCAACGGCGAGATCCGGAAGC
GGCCCCTGATCGAGACCAACGGCGAGACCGGCGAGATCGTGTGGGACAAGGGCCGGGACTT
CGCCACCGTGCGGAAGGTGCTGAGCATGCCCCAGGTGAACATCGTGAAGAAAACCGAGGTG
CAGACCGGCGGCTTCAGCAAGGAGAGCATCCTGCCCAAGCGGAACAGCGACAAGCTGATCG
CCCGGAAGAAGGACTGGGACCCCAAGAAGTACGGCGGCTTCGACAGCCCCACCGTGGCCTA
CAGCGTGCTGGTGGTGGCCAAGGTGGAGAAGGGCAAGAGCAAGAAGCTGAAATCCGTGAA
GGAGCTGCTGGGCATCACCATCATGGAGCGGAGCAGCTTCGAGAAGAACCCCATCGACTTC
CTGGAGGCCAAGGGCTACAAGGAGGTGAAGAAGGACCTGATCATCAAGCTGCCCAAGTACA
GCCTGTTCGAGCTGGAGAACGGCCGGAAGCGGATGCTGGCCAGCGCCGGCGAGCTGCAGAA
GGGCAACGAGCTGGCCCTGCCCAGCAAGTACGTGAACTTCCTGTACCTGGCCAGCCACTACG
AGAAGCTGAAGGGCAGCCCCGAGGACAACGAGCAGAAGCAGCTGTTCGTGGAGCAGCACA
AGCACTACCTGGACGAGATCATCGAGCAGATCAGCGAGTTCAGCAAGCGGGTGATCCTGGC
CGACGCCAACCTGGACAAGGTGCTGAGCGCCTACAACAAGCACCGGGACAAGCCCATCCGG
GAGCAGGCCGAGAACATCATCCACCTGTTCACCCTGACCAACCTGGGCGCCCCCGCCGCCTT
CAAGTACTTCGACACCACCATCGACCGGAAGCGGTACACCAGCACCAAGGAGGTGCTGGAC
GCCACCCTGATCCACCAGAGCATCACCGGCCTGTACGAGACCCGGATCGACCTGAGCCAGCT
GGGCGGCGAC
(SEQ ID NO: 9)
GCCAAGCGGAACTACATCCTGGGCCTGGCCATCGGCATCACCAGCGTGGGCTACGGCATCAT
CGACTACGAGACCCGGGACGTGATCGACGCCGGCGTGCGGCTGTTCAAGGAGGCCAACGTG
GAGAACAACGAGGGCCGGCGGAGCAAGCGGGGCGCCCGGCGGCTGAAGCGGCGGCGGCGG
CACCGGATCCAGCGGGTGAAGAAGCTGCTGTTCGACTACAACCTGCTGACCGACCACAGCG
AGCTGAGCGGCATCAACCCCTACGAGGCCCGGGTGAAGGGCCTGAGCCAGAAGCTGAGCGA
GGAGGAGTTCAGCGCCGCCCTGCTGCACCTGGCCAAGCGGCGGGGCGTGCACAACGTGAAC
GAGGTGGAGGAGGACACCGGCAACGAGCTGAGCACCAAGGAGCAGATCAGCCGGAACAGC
AAGGCCCTGGAGGAGAAGTACGTGGCCGAGCTGCAGCTGGAGCGGCTGAAGAAGGACGGC
GAGGTGCGGGGCAGCATCAACCGGTTCAAGACCAGCGACTACGTGAAGGAGGCCAAGCAGC
TGCTGAAGGTGCAGAAGGCCTACCACCAGCTGGACCAGAGCTTCATCGACACCTACATCGA
CCTGCTGGAGACCCGGCGGACCTACTACGAGGGCCCCGGCGAGGGCAGCCCCTTCGGCTGG
AAGGACATCAAGGAGTGGTACGAGATGCTGATGGGCCACTGCACCTACTTCCCCGAGGAGC
TGCGGAGCGTGAAGTACGCCTACAACGCCGACCTGTACAACGCCCTGAACGACCTGAACAA
CCTGGTGATCACCCGGGACGAGAACGAGAAGCTGGAGTACTACGAGAAGTTCCAGATCATC
GAGAACGTGTTCAAGCAGAAGAAGAAGCCCACCCTGAAGCAGATCGCCAAGGAGATCCTGG
TGAACGAGGAGGACATCAAGGGCTACCGGGTGACCAGCACCGGCAAGCCCGAGTTCACCAA
CCTGAAGGTGTACCACGACATCAAGGACATCACCGCCCGGAAGGAGATCATCGAGAACGCC
GAGCTGCTGGACCAGATCGCCAAGATCCTGACCATCTACCAGAGCAGCGAGGACATCCAGG
AGGAGCTGACCAACCTGAACAGCGAGCTGACCCAGGAGGAGATCGAGCAGATCAGCAACCT
GAAGGGCTACACCGGCACCCACAACCTGAGCCTGAAGGCCATCAACCTGATCCTGGACGAG
CTGTGGCACACCAACGACAACCAGATCGCCATCTTCAACCGGCTGAAGCTGGTGCCCAAGA
AGGTGGACCTGAGCCAGCAGAAGGAGATCCCCACCACCCTGGTGGACGACTTCATCCTGAG
CCCCGTGGTGAAGCGGAGCTTCATCCAGAGCATCAAGGTGATCAACGCCATCATCAAGAAG
TACGGCCTGCCCAACGACATCATCATCGAGCTGGCCCGGGAGAAGAACAGCAAGGACGCCC
AGAAGATGATCAACGAGATGCAGAAGCGGAACCGGCAGACCAACGAGCGGATCGAGGAGA
TCATCCGGACCACCGGCAAGGAGAACGCCAAGTACCTGATCGAGAAGATCAAGCTGCACGA
CATGCAGGAGGGCAAGTGCCTGTACAGCCTGGAGGCCATCCCCCTGGAGGACCTGCTGAAC
AACCCCTTCAACTACGAGGTGGACGCCATCATCCCCCGGAGCGTGAGCTTCGACAACAGCTT
CAACAACAAGGTGCTGGTGAAGCAGGAGGAGAACAGCAAGAAGGGCAACCGGACCCCCTT
CCAGTACCTGAGCAGCAGCGACAGCAAGATCAGCTACGAGACCTTCAAGAAGCACATCCTG
AACCTGGCCAAGGGCAAGGGCCGGATCAGCAAGACCAAGAAGGAGTACCTGCTGGAGGAG
CGGGACATCAACCGGTTCAGCGTGCAGAAGGACTTCATCAACCGGAACCTGGTGGACACCC
GGTACGCCACCCGGGGCCTGATGAACCTGCTGCGGAGCTACTTCCGGGTGAACAACCTGGA
CGTGAAGGTGaaatccATCAACGGCGGCTTCACCAGCTTCCTGCGGCGGAAGTGGAAGTTCAAG
AAGGAGCGGAACAAGGGCTACAAGCACCACGCCGAGGACGCCCTGATCATCGCCAACGCCG
ACTTCATCTTCAAGGAGTGGAAGAAGCTGGACAAGGCCAAGAAGGTGATGGAGAACCAGAT
GTTCGAGGAGAAGCAGGCCGAGAGCATGCCCGAGATCGAGACCGAGCAGGAGTACAAGGA
GATCTTCATCACCCCCCACCAGATCAAGCACATCAAGGACTTCAAGGACTACAAGTACAGCC
ACCGGGTGGACAAGAAGCCCAACCGGAAGCTGATCAACGACACCCTGTACAGCACCCGGAA
GGACGACAAGGGCAACACCCTGATCGTGAACAACCTGAACGGCCTGTACGACAAGGACAAC
GACAAGCTGAAGAAGCTGATCAACAAGAGCCCCGAGAAGCTGCTGATGTACCACCACGACC
CCCAGACCTACCAGAAGCTGAAGCTGATCATGGAGCAGTACGGCGACGAGAAGAACCCCCT
GTACAAGTACTACGAGGAGACCGGCAACTACCTGACCAAGTACAGCAAGAAGGACAACGGC
CCCGTGATCAAGAAGATCAAGTACTACGGCAACAAGCTGAACGCCCACCTGGACATCACCG
ACGACTACCCCAACAGCCGGAACAAGGTGGTGAAGCTGAGCCTGAAGCCCTACCGGTTCGA
CGTGTACCTGGACAACGGCGTGTACAAGTTCGTGACCGTGAAGAACCTGGACGTGATCAAG
AAGGAGAACTACTACGAGGTGAACAGCAAGTGCTACGAGGAGGCCAAGAAGCTGAAGAAG
ATCAGCAACCAGGCCGAGTTCATCGCCAGCTTCTACAAGAACGACCTGATCAAGATCAACG
GCGAGCTGTACCGGGTGATCGGCGTGAACAACGACCTGCTGAACCGGATCGAGGTGAACAT
GATCGACATCACCTACCGGGAGTACCTGGAGAACATGAACGACAAGCGGCCCCCCCACATC
ATCAAGACCATCGCCAGCAAGACCCAGAGCATCAAGAAGTACAGCACCGACATCCTGGGCA
ACCTGTACGAGGTGaaatccAAGAAGCACCCCCAGATCATCAAGAAGGGC

Guide RNA (gRNA)

[0150] In some embodiments, a targeting moiety may comprise a Cas molecule comprising or linked (e.g., covalently) to a gRNA. A gRNA is a short synthetic RNA composed of a “scaffold” sequence necessary for Cas-protein binding and a user-defined ˜20 nucleotide targeting sequence for a genomic target. In practice, guide RNA sequences are generally designed to have a length of between 17-24 nucleotides (e.g., 19, 20, or 21 nucleotides) and be complementary to the targeted nucleic acid sequence. In some embodiments the gRNA comprises 3-6 flanking phosphorothioate (PS) linkages, e.g., 3 flanking PS linkages at each end. Custom gRNA generators and algorithms are available commercially for use in the design of effective guide RNAs. Gene editing has also been achieved using a chimeric “single guide RNA” (“sgRNA”), an engineered (synthetic) single RNA molecule that mimics a naturally occurring crRNA-tracrRNA complex and contains both a tracrRNA (for binding the nuclease) and at least one crRNA (to guide the nuclease to the sequence targeted for editing). Chemically modified sgRNAs have also been demonstrated to be effective for use with Cas proteins; see, for example, Hendel et al. (2015) Nature Biotechnol., 985-991.

[0151] In some embodiments, a gRNA comprises a nucleic acid sequence that is complementary to a DNA sequence associated with a target gene. In some embodiments, the DNA sequence is, comprises, or overlaps an expression control element that is operably linked to the target gene. In some embodiments, a gRNA comprises a nucleic acid sequence that is at least 90, 95, 99, or 100% complementary to a DNA sequence associated with a target gene. In some embodiments, a gRNA for use with a targeting moiety that comprises a Cas molecule is an sgRNA. In some embodiments, a gRNA binds to a nucleic acid sequence comprising a sequence selected from Table 4, Table 5, Table 6, Table 7 or a sequence having at least 70, 75, 80, 85, 90, 91, 92, 93, 94, 95, 96, 97, 98, or 99% identity thereto, or differing at no more than 1, 2, 3, 4, or 5 positions relative thereto.

[0152] In some embodiments, a gRNA for use with a CRISPR/Cas molecule specifically binds a target sequence associated with β-2-microglobulin expression. In some embodiments, a gRNA for use with a CRISPR/Cas molecule specifically binds a target sequence associated with one or more of CXCL1-8 gene expression. Such a gRNA may comprise a target-binding sequence selected from SEQ ID NOs: 20-62.

[0153] In some embodiments, a targeting moiety is or comprises a TAL effector molecule. A TAL effector molecule, e.g., a TAL effector molecule that specifically binds a DNA sequence, comprises a plurality of TAL effector domains or fragments thereof, and optionally one or more additional portions of naturally occurring TAL effectors (e.g., N- and/or C-terminal of the plurality of TAL effector domains). Many TAL effectors are known to those of skill in the art and are commercially available, e.g., from Thermo Fisher Scientific.

[0154] TALEs are natural effector proteins secreted by numerous species of bacterial pathogens including the plant pathogen Xanthomonas which modulates gene expression in host plants and facilitates bacterial colonization and survival. The specific binding of TAL effectors is based on a central repeat domain of tandemly arranged nearly identical repeats of typically 33 or 34 amino acids (the repeat-variable di-residues, RVD domain).

[0155] Members of the TAL effectors family differ mainly in the number and order of their repeats. The number of repeats ranges from 1.5 to 33.5 repeats and the C-terminal repeat is usually shorter in length (e.g., about 20 amino acids) and is generally referred to as a “half-repeat”. Each repeat of the TAL effector feature a one-repeat-to-one-base-pair correlation with different repeat types exhibiting different base-pair specificity (one repeat recognizes one base-pair on the target gene sequence). Generally, the smaller the number of repeats, the weaker the protein-DNA interactions. A number of 6.5 repeats has been shown to be sufficient to activate transcription of a reporter gene (Scholze et al., 2010).

[0156] Repeat to repeat variations occur predominantly at amino acid positions 12 and 13, which have therefore been termed “hypervariable” and which are responsible for the specificity of the interaction with the target DNA promoter sequence, as shown in Table 2 listing exemplary repeat variable di-residues (RVD) and their correspondence to nucleic acid base targets.

TABLE 2
RVDs and Nucleic Acid Base Specificity

| Target | Possible RVD Amino Acid Combinations | | | | | | | | | | | | |
|---|---|---|---|---|---|---|---|---|---|---|---|---|---|
| A | NI | NN | CI | HI | KI | | | | | | | | |
| G | NN | GN | SN | VN | LN | DN | QN | EN | HN | RH | NK | AN | FN |
| C | HD | RD | KD | ND | AD | | | | | | | | |
| T | NG | HG | VG | IG | EG | MG | YG | AA | EP | VA | QG | KG | RG |

[0157] Accordingly, it is possible to modify the repeats of a TAL effector to target specific DNA sequences. Further studies have shown that the RVD NK can target G. Target sites of TAL effectors also tend to include a T flanking the 5′ base targeted by the first repeat, but the exact mechanism of this recognition is not known. More than 113 TAL effector sequences are known to date. Non-limiting examples of TAL effectors from Xanthomonas include, Hax2, Hax3, Hax4, AvrXa7, AvrXa10 and AvrBs3.

[0158] Accordingly, the TAL effector domain of the TAL effector molecule of the present disclosure may be derived from a TAL effector from any bacterial species (e.g., Xanthomonas species such as the African strain of Xanthomonas oryzae pv. Oryzae (Yu et al. 2011), Xanthomonas campestris pv. raphani strain 756C and Xanthomonas oryzae pv. oryzicola strain BLS256 (Bogdanove et al. 2011). As used herein, the TAL effector domain in accordance with the present disclosure comprises an RVD domain as well as flanking sequence(s) (sequences on the N-terminal and/or C-terminal side of the RVD domain) also from the naturally occurring TAL effector. It may comprise more or fewer repeats than the RVD of the naturally occurring TAL effector. The TAL effector molecule of the present disclosure is designed to target a given DNA sequence based on the above code and others known in the art. The number of TAL effector domains (e.g., repeats (monomers or modules)) and their specific sequence are selected based on the desired DNA target sequence. For example, TAL effector domains, e.g., repeats, may be removed or added in order to suit a specific target sequence. In an embodiment, the TAL effector molecule of the present disclosure comprises between 6.5 and 33.5 TAL effector domains, e.g., repeats. In an embodiment, TAL effector molecule of the present disclosure comprises between 8 and 33.5 TAL effector domains, e.g., repeats, e.g., between 10 and 25 TAL effector domains, e.g., repeats, e.g., between 10 and 14 TAL effector domains, e.g., repeats.

[0159] In some embodiments, the TAL effector molecule comprises TAL effector domains that correspond to a perfect match to the DNA target sequence. In some embodiments, a mismatch between a repeat and a target base-pair on the DNA target sequence is permitted as along as it allows for the function of the site-specific disrupting agent comprising the TAL effector molecule. In general, TALE binding is inversely correlated with the number of mismatches. In some embodiments, the TAL effector molecule of a site-specific disrupting agent of the present disclosure comprises no more than 7 mismatches, 6 mismatches, 5 mismatches, 4 mismatches, 3 mismatches, 2 mismatches, or 1 mismatch, and optionally no mismatch, with the target DNA sequence. Without wishing to be bound by theory, in general the smaller the number of TAL effector domains in the TAL effector molecule, the smaller the number of mismatches will be tolerated and still allow for the function of the site-specific disrupting agent comprising the TAL effector molecule. The binding affinity is thought to depend on the sum of matching repeat-DNA combinations. For example, TAL effector molecules having 25 TAL effector domains or more may be able to tolerate up to 7 mismatches.

[0160] In addition to the TAL effector domains, the TAL effector molecule of the present disclosure may comprise additional sequences derived from a naturally occurring TAL effector. The length of the C-terminal and/or N-terminal sequence(s) included on each side of the TAL effector domain portion of the TAL effector molecule can vary and be selected by one skilled in the art, for example based on the studies of Zhang et al. (2011). Zhang et al., have characterized a number of C-terminal and N-terminal truncation mutants in Hax3 derived TAL-effector based proteins and have identified key elements, which contribute to optimal binding to the target sequence and thus activation of transcription. Generally, it was found that transcriptional activity is inversely correlated with the length of N-terminus. Regarding the C-terminus, an important element for DNA binding residues within the first 68 amino acids of the Hax 3 sequence was identified. Accordingly, in some embodiments, the first 68 amino acids on the C-terminal side of the TAL effector domains of the naturally occurring TAL effector is included in the TAL effector molecule of a site-specific disrupting agent of the present disclosure. Accordingly, in an embodiment, a TAL effector molecule of the present disclosure comprises 1) one or more TAL effector domains derived from a naturally occurring TAL effector; 2) at least 70, 80, 90, 100, 110, 120, 130, 140, 150, 170, 180, 190, 200, 220, 230, 240, 250, 260, 270, 280 or more amino acids from the naturally occurring TAL effector on the N-terminal side of the TAL effector domains; and/or 3) at least 68, 80, 90, 100, 110, 120, 130, 140, 150, 170, 180, 190, 200, 220, 230, 240, 250, 260 or more amino acids from the naturally occurring TAL effector on the C-terminal side of the TAL effector domains.

[0161] In some embodiments, a targeting moiety is or comprises a Zn finger molecule. A Zn finger molecule comprises a Zn finger protein, e.g., a naturally occurring Zn finger protein or engineered Zn finger protein, or fragment thereof. Many Zn finger proteins are known to those of skill in the art and are commercially available, e.g., from Sigma-Aldrich.

[0162] In some embodiments, a Zn finger molecule comprises a non-naturally occurring Zn finger protein that is engineered to bind to a target DNA sequence of choice. See, for example, Beerli, et al. (2002) Nature Biotechnol. 20:135-141; Pabo, et al. (2001) Ann. Rev. Biochem. 70:313-340; Isalan, et al. (2001) Nature Biotechnol. 19:656-660; Segal, et al. (2001) Curr. Opin. Biotechnol. 12:632-637; Choo, et al. (2000) Curr. Opin. Struct. Biol. 10:411-416; U.S. Pat. Nos. 6,453,242; 6,534,261; 6,599,692; 6,503,717; 6,689,558; 7,030,215; 6,794,136; 7,067,317; 7,262,054; 7,070,934; 7,361,635; 7,253,273; and U.S. Patent Publication Nos. 2005/0064474; 2007/0218528; 2005/0267061, all incorporated herein by reference in their entireties.

[0163] An engineered Zn finger protein may have a novel binding specificity, compared to a naturally-occurring Zn finger protein. Engineering methods include, but are not limited to, rational design and various types of selection. Rational design includes, for example, using databases comprising triplet (or quadruplet) nucleotide sequences and individual Zn finger amino acid sequences, in which each triplet or quadruplet nucleotide sequence is associated with one or more amino acid sequences of zinc fingers which bind the particular triplet or quadruplet sequence. See, for example, U.S. Pat. Nos. 6,453,242 and 6,534,261, incorporated by reference herein in their entireties.

[0164] Exemplary selection methods, including phage display and two-hybrid systems, are disclosed in U.S. Pat. Nos. 5,789,538; 5,925,523; 6,007,988; 6,013,453; 6,410,248; 6,140,466; 6,200,759; and 6,242,568; as well as International Patent Publication Nos. WO 98/37186; WO 98/53057; WO 00/27878; and WO 01/88197 and GB 2,338,237. In addition, enhancement of binding specificity for zinc finger proteins has been described, for example, in International Patent Publication No. WO 02/077227.

[0165] In addition, as disclosed in these and other references, zinc finger domains and/or multi-fingered zinc finger proteins may be linked together using any suitable linker sequences, including for example, linkers of 5 or more amino acids in length. See, also, U.S. Pat. Nos. 6,479,626; 6,903,185; and 7,153,949 for exemplary linker sequences 6 or more amino acids in length. The proteins described herein may include any combination of suitable linkers between the individual zinc fingers of the protein. In addition, enhancement of binding specificity for zinc finger binding domains has been described, for example, in co-owned International Patent Publication No. WO 02/077227.

[0166] Zn finger proteins and methods for design and construction of fusion proteins (and polynucleotides encoding same) are known to those of skill in the art and described in detail in U.S. Pat. Nos. 6,140,0815; 789,538; 6,453,242; 6,534,261; 5,925,523; 6,007,988; 6,013,453; and 6,200,759; International Patent Publication Nos. WO 95/19431; WO 96/06166; WO 98/53057; WO 98/54311; WO 00/27878; WO 01/60970; WO 01/88197; WO 02/099084; WO 98/53058; WO 98/53059; WO 98/53060; WO 02/016536; and WO 03/016496.

[0167] In addition, as disclosed in these and other references, Zn finger proteins and/or multi-fingered Zn finger proteins may be linked together, e.g., as a fusion protein, using any suitable linker sequences, including for example, linkers of 5 or more amino acids in length. See, also, U.S. Pat. Nos. 6,479,626; 6,903,185; and 7,153,949 for exemplary linker sequences 6 or more amino acids in length. The Zn finger molecules described herein may include any combination of suitable linkers between the individual zinc finger proteins and/or multi-fingered Zn finger proteins of the Zn finger molecule.

[0168] In certain embodiments, the targeting moiety comprises a Zn finger molecule comprising an engineered zinc finger protein that binds (in a sequence-specific manner) to a target DNA sequence. In some embodiments, the Zn finger molecule comprises one Zn finger protein or fragment thereof. In other embodiments, the Zn finger molecule comprises a plurality of Zn finger proteins (or fragments thereof), e.g., 2, 3, 4, 5, 6 or more Zn finger proteins (and optionally no more than 12, 11, 10, 9, 8, 7, 6, 5, 4, 3, or 2 Zn finger proteins). In some embodiments, the Zn finger molecule comprises at least three Zn finger proteins. In some embodiments, the Zn finger molecule comprises four, five or six fingers. In some embodiments, the Zn finger molecule comprises 8, 9, 10, 11 or 12 fingers. In some embodiments, a Zn finger molecule comprising three Zn finger proteins recognizes a target DNA sequence comprising 9 or 10 nucleotides. In some embodiments, a Zn finger molecule comprising four Zn finger proteins recognizes a target DNA sequence comprising 12 to 14 nucleotides. In some embodiments, a Zn finger molecule comprising six Zn finger proteins recognizes a target DNA sequence comprising 18 to 21 nucleotides.

[0169] In some embodiments, a Zn finger molecule comprises a two-handed Zn finger protein. Two handed zinc finger proteins are those proteins in which two clusters of zinc finger proteins are separated by intervening amino acids so that the two zinc finger domains bind to two discontinuous target DNA sequences. An example of a two handed type of zinc finger binding protein is SIP1, where a cluster of four zinc finger proteins is located at the amino terminus of the protein and a cluster of three Zn finger proteins is located at the carboxyl terminus (see Remade, et al. (1999) EMBO Journal 18(18):5073-5084). Each cluster of zinc fingers in these proteins is able to bind to a unique target sequence and the spacing between the two target sequences can comprise many nucleotides.

[0170] In some embodiments, a targeting moiety is or comprises a DNA-binding domain from a nuclease. For example, the recognition sequences of homing endonucleases and meganucleases such as I-Scel, I-Ceul, PI-PspI, PI-Sce, I-SceIV, I-CsmI, I-PanI, I-Scell, I-PpoI, I-ScellI, I-Crel, I-TevI, I-TevII and I-TevIII are known. See also U.S. Pat. Nos. 5,420,032; 6,833,252; Belfort, et al. (1997) Nucleic Acids Res. 25:3379-3388; Dujon, et al. (1989) Gene 82:115-118; Perler, et al. (1994) Nucleic Acids Res. 22:1125-1127; Jasin (1996) Trends Genet. 12:224-228; Gimble, et al. (1996) J. Mol. Biol. 263:163-180; Argast, et al. (1998) J. Mol. Biol. 280:345-353 and the New England Biolabs catalogue. In addition, the DNA-binding specificity of homing endonucleases and meganucleases can be engineered to bind non-natural target sites. See, for example, Chevalier, et al. (2002) Molec. Cell 10:895-905; Epinat, et al. (2003) Nucleic Acids Res. 31:2952-2962; Ashworth, et al. (2006) Nature 441:656-659; Paques, et al. (2007) Current Gene Therapy 7:49-66; U.S. Patent Publication No. 2007/0117128.

[0171] In some embodiments, a targeting moiety comprises a nucleic acid. In some embodiments, a nucleic acid that may be included in a targeting moiety, may be or comprise DNA, RNA, and/or an artificial or synthetic nucleic acid or nucleic acid analog or mimic. For example, in some embodiments, a nucleic acid may be or include one or more of genomic DNA (gDNA), complementary DNA (cDNA), a peptide nucleic acid (PNA), a peptide-oligonucleotide conjugate, a locked nucleic acid (LNA), a bridged nucleic acid (BNA), a polyamide, a triplex-forming oligonucleotide, an antisense oligonucleotide, tRNA, mRNA, rRNA, miRNA, gRNA, siRNA or other RNAi molecule (e.g., that targets a non-coding RNA as described herein and/or that targets an expression product of a particular gene associated with a targeted genomic complex as described herein), etc. In some embodiments, a nucleic acid may include one or more residues that is not a naturally occurring DNA or RNA residue, may include one or more linkages that is/are not phosphodiester bonds (e.g., that may be, for example, phosphorothioate bonds, etc), and/or may include one or more modifications such as, for example, a 2′O modification such as 2′-OMeP. A variety of nucleic acid structures useful in preparing synthetic nucleic acids is known in the art (see, for example, WO2017/0628621 and WO2014/012081) those skilled in the art will appreciate that these may be utilized in accordance with the present disclosure.

[0172] A nucleic acid suitable for use in a site-specific disrupting agent, e.g., in a targeting moiety, may include, but is not limited to, DNA, RNA, modified oligonucleotides (e.g., chemical modifications, such as modifications that alter backbone linkages, sugar molecules, and/or nucleic acid bases), and artificial nucleic acids. In some embodiments, a nucleic acid includes, but is not limited to, genomic DNA, cDNA, peptide nucleic acids (PNA) or peptide oligonucleotide conjugates, locked nucleic acids (LNA), bridged nucleic acids (BNA), polyamides, triplex forming oligonucleotides, modified DNA, antisense DNA oligonucleotides, tRNA, mRNA, rRNA, modified RNA, miRNA, gRNA, and siRNA or other RNA or DNA molecules.

[0173] In some embodiments, a targeting moiety comprises a nucleic acid with a length from about 15-200, 20-200, 30-200, 40-200, 50-200, 60-200, 70-200, 80-200, 90-200, 100-200, 110-200, 120-200, 130-200, 140-200, 150-200, 160-200, 170-200, 180-200, 190-200, 215-190, 20-190, 30-190, 40-190, 50-190, 60-190, 70-190, 80-190, 90-190, 100-190, 110-190, 120-190, 130-190, 140-190, 150-190, 160-190, 170-190, 180-190, 15-180, 20-180, 30-180, 40-180, 50-180, 60-180, 70-180, 80-180, 90-180, 100-180, 110-180, 120-180, 130-180, 140-180, 150-180, 160-180, 170-180, 15-170, 20-170, 30-170, 40-170, 50-170, 60-170, 70-170, 80-170, 90-170, 100-170, 110-170, 120-170, 130-170, 140-170, 150-170, 160-170, 15-160, 20-160, 30-160, 40-160, 50-160, 60-160, 70-160, 80-160, 90-160, 100-160, 110-160, 120-160, 130-160, 140-160, 150-160, 215-150, 20-150, 30-150, 40-150, 50-150, 60-150, 70-150, 80-150, 90-150, 100-150, 110-150, 120-150, 130-150, 140-150, 15-140, 20-140, 30-140, 40-140, 50-140, 60-140, 70-140, 80-140, 90-140, 100-140, 110-140, 120-140, 130-140, 15-130, 20-130, 30-130, 40-130, 50-130, 60-130, 70-130, 80-130, 90-130, 100-130, 110-130, 120-130, 215-120, 20-120, 30-120, 40-120, 50-120, 60-120, 70-120, 80-120, 90-120, 100-120, 110-120, 15-110, 20-110, 30-110, 40-110, 50-110, 60-110, 70-110, 80-110, 90-110, 100-110, 15-100, 20-100, 30-100, 40-100, 50-100, 60-100, 70-100, 80-100, 90-100, 15-90, 20-90, 30-90, 40-90, 50-90, 60-90, 70-90, 80-90, 15-80, 20-80, 30-80, 40-80, 50-80, 60-80, 70-80, 15-70, 20-70, 30-70, 40-70, 50-70, 60-70, 15-60, 20-60, 30-60, 40-60, 50-60, 15-50, 20-50, 30-50, 40-50, 15-40, 20-40, 30-40, 15-30, 20-30, or 15-20 nucleotides, or any range therebetween.

[0174] Effector Moieties

[0175] A site-specific disrupting agent of the present disclosure may comprise one or more effector moieties. An effector moiety has one or more functionalities that, when used as part of a site-specific disrupting agent described herein, modulate, e.g., decrease, expression of a target plurality of genes in a cell. In some embodiments, an effector moiety physically or sterically blocks an anchor sequence, e.g., such that binding of a genomic complex component (e.g., a nucleating polypeptide) to the anchor sequence is inhibited (e.g., prevented). In some embodiments, an effector moiety destabilizes the interaction of a genomic complex component (e.g., nucleating polypeptide) with an anchor sequence, e.g., by altering (e.g., decreasing) the affinity and/or avidity at which the genomic complex component binds the anchor sequence. For example, an effector moiety may recruit a factor that inhibits formation of or destabilizes a genomic complex, e.g., ASMC, or it may inhibit recruitment of a factor (e.g., a genomic complex component or transcription factor) necessary for formation or maintenance of a genomic complex (e.g., ASMC). In some embodiments, an effector moiety has epigenetic modification functionality in that it modulates the epigenetic landscape of the anchor sequence or a sequence proximal to the anchor sequence, e.g., by promoting (e.g., catalyzing) application or removal of one or more epigenetic modifications to the DNA or a histone associated thereto, to decrease expression of a target plurality of genes. In some embodiments, an effector moiety has genetic modification functionality, e.g., it introduces an alteration (e.g., an insertion, deletion, or substitution) to an anchor sequence or a sequence proximal thereto.

[0176] In some embodiments, an effector moiety comprises a CRISPR/Cas molecule, a TAL effector molecule, a Zn finger molecule, a tetR domain, or a meganuclease. In some embodiments, an effector moiety has genetic modification functionality, e.g., a CRISPR/Cas molecule, a TAL effector molecule, a Zn finger molecule with endonuclease activity capable of making a genetic alteration in a method described herein.

[0177] In some embodiments, an effector moiety comprises a histone modifying functionality, e.g., a histone methyltransferase, histone demethylase, or histone deacetylase activity. In some embodiments, a histone methyltransferase functionality comprises H3K9 targeting methyltransferase activity. In some embodiments, a histone methyltransferase functionality comprises H3K56 targeting methyltransferase activity. In some embodiments, a histone methyltransferase functionality comprises H3K27 targeting methyltransferase activity. In some embodiments, a histone methyltransferase or demethylase functionality transfers one, two, or three methyl groups. In some embodiments, a histone demethylase functionality comprises H3K4 targeting demethylase activity. In some embodiments, an effector moiety comprises a protein chosen from SETDB1, SETDB2, EHMT2 (i.e., G9A), EHMT1 (i.e., GLP), SUV39H1, EZH2, EZH1, SUV39H2, SETD8, SUV420H1, SUV420H2, or a functional variant or fragment of any thereof, e.g., a SET domain of any thereof. In some embodiments, an effector moiety comprises a protein chosen from KDM1A (i.e., LSD1), KDM1B (i.e., LSD2), KDM2A, KDM2B, KDM5A, KDM5B, KDM5C, KDM5D, KDM4B, N066, or a functional variant or fragment of any thereof. In some embodiments, an effector moiety comprises a protein chosen from HDAC1, HDAC2, HDAC3, HDAC4, HDAC5, HDAC6, HDAC7, HDAC8, HDAC9, HDAC10, HDAC11, SIRT1, SIRT2, SIRT3, SIRT4, SIRT5, SIRT6, SIRT7, SIRT8, SIRT9, or a functional variant or fragment of any thereof. In some embodiments, an effector moiety comprises a DNA modifying functionality, e.g., a DNA methyltransferase. In some embodiments, an effector moiety comprises a protein chosen from MQ1, DNMT1, DNMT3A1, DNMT3A2, DNMT3B1, DNMT3B2, DNMT3B3, DNMT3B4, DNMT3B5, DNMT3B6, DNMT3L, or a functional variant or fragment of any thereof.

[0178] In some embodiments, an effector moiety comprises a transcription repressor. In some embodiments the transcription repressor blocks recruitment of a factor that stimulates or promotes transcription, e.g., of the target gene. In some embodiments, the transcription repressor recruits a factor that inhibits transcription, e.g., of the target gene. In some embodiments, an effector moiety, e.g., transcription repressor, is or comprises a protein chosen from KRAB, MeCP2, HP1, RBBP4, REST, FOG1, SUZ12, or a functional variant or fragment of any thereof.

[0179] In some embodiments, an effector moiety comprises a protein having a functionality described herein. In some embodiments, an effector moiety comprises a protein selected from:
[0180] KRAB (e.g., as according to NP_056209.2 or the protein encoded by NM_015394.5); a SET domain (e.g., the SET domain of:
[0181] SETDB1 (e.g., as according to NP_001353347.1 or the protein encoded by NM_001366418.1);
[0182] EZH2 (e.g., as according to NP-004447.2 or NP_001190176.1 or the protein encoded by NM_004456.5 or NM_001203247.2);
[0183] G9A (e.g., as according to NP_001350618.1 or the protein encoded by NM_001363689.1); or
[0184] SUV39H1 (e.g., as according to NP_003164.1 or the protein encoded by NM_003173.4));
[0185] histone demethylase LSD1 (e.g., as according to NP_055828.2 or the protein encoded by NM_015013.4);
[0186] FOG1 (e.g., the N-terminal residues of FOG1) (e.g., as according to NP_722520.2 or the protein encoded by NM_153813.3); or
[0187] KAP1 (e.g., as according to NP_005753.1 or the protein encoded by NM_005762.3); a functional fragment or variant of any thereof, or
[0188] a polypeptide with a sequence that has at least 80, 85, 90, 91, 92, 93, 94, 95, 96, 97, 98, or 99% identity to any of the above-referenced sequences. In some embodiments, an effector moiety comprises a protein selected from:
[0189] DNMT3A (e.g., human DNMT3A) (e.g., as according to NP_072046.2 or the protein encoded by NM_022552.4);
[0190] DNMT3B (e.g., as according to NP_008823.1
[0191] or the protein encoded by NM_006892.4);
[0192] DNMT3L (e.g., as according to NP_787063.1
[0193] or the protein encoded by NM_175867.3);
[0194] DNMT3A/3L complex,
[0195] bacterial MQ1 (e.g., as according to CAA35058.1 obtained from strain ATCC 33825 or Uniprot ID P15840.3);
[0196] a functional fragment of any thereof, or
[0197] a polypeptide with a sequence that has at least 80, 85, 90, 91, 92, 93, 94, 95, 96, 97, 98, or 99% identity to any of the above-referenced sequences. In some embodiments, an effector moiety comprises a mature bacterial MQ1 (e.g., as according to CAA35058.1 obtained from strain ATCC 33825 or Uniprot ID P15840.3

[0198] An exemplary effector moiety may include, but is not limited to: ubiquitin, bicyclic peptides as ubiquitin ligase inhibitors, transcription factors, DNA and protein modification enzymes such as topoisomerases, topoisomerase inhibitors such as topotecan, DNA methyltransferases such as the DNMT family (e.g., DNMT3A, DNMT3B, DNMT3L), protein methyltransferases (e.g., viral lysine methyltransferase (vSET), protein-lysine N-methyltransferase (SMYD2), deaminases (e.g., APOBEC, UG1), histone methyltransferases such as enhancer of zeste homolog 2 (EZH2), PRMT1, histone-lysine-N-methyltransferase (Setdb1), histone methyltransferase (SET2), euchromatic histone-lysine N-methyltransferase 2 (G9a), histone-lysine N-methyltransferase (SUV39H1), and G9a), histone deacetylase (e.g., HDAC1, HDAC2, HDAC3), enzymes with a role in DNA demethylation (e.g., the TET family enzymes catalyze oxidation of 5-methylcytosine to 5-hydroxymethylcytosine and higher oxidative derivatives), protein demethylases such as KDM1A and lysine-specific histone demethylase 1 (LSD1), helicases such as DHX9, deacetylases (e.g., sirtuin 1, 2, 3, 4, 5, 6, or 7), kinases, phosphatases, DNA-intercalating agents such as ethidium bromide, SYBR green, and proflavine, efflux pump inhibitors such as peptidomimetics like phenylalanine arginyl β-naphthylamide or quinoline derivatives, nuclear receptor activators and inhibitors, proteasome inhibitors, competitive inhibitors for enzymes such as those involved in lysosomal storage diseases, protein synthesis inhibitors, nucleases (e.g., Cpf1, Cas9, zinc finger nuclease), fusions of one or more thereof (e.g., dCas9-DNMT, dCas9-APOBEC, dCas9-UG1), and specific domains from proteins, such as a KRAB domain.

[0199] In some embodiments, a candidate domain may be determined to be suitable for use as an effector moiety by methods known to those of skill in the art. For example, a candidate effector moiety may be tested by assaying whether, when the candidate effector moiety is present in the nucleus of a cell and appropriately localized (e.g., to a target gene or transcription control element operably linked to said target gene, e.g., via a Targeting moiety), the candidate effector moiety decreases expression of the target gene in the cell, e.g., decreases the level of RNA transcript encoded by the target gene (e.g., as measured by RNASeq or Northern blot) or decreases the level of protein encoded by the target gene (e.g., as measured by ELISA).

[0200] In some embodiments, a site-specific disrupting agent comprises an effector moiety that does not bind (e.g., does not detectably bind) to another copy of the effector moiety, e.g., the effector moiety is monomeric and does not associate into multimers. In some embodiments, a site-specific disrupting agent comprises an effector moiety that associates with a further copy of the effector moiety into a multimer, e.g., dimers, trimers, tetramers, or further. In some embodiments, a site-specific disrupting agent comprises a plurality of effector moieties, wherein each effector moiety does not detectably bind, e.g., does not bind, to another effector moiety. In some embodiments, an effector moiety for use in the compositions and methods described herein is functional in a monomeric, e.g., non-dimeric, state.

[0201] In some embodiments, an effector moiety comprises an epigenetic modifying moiety, e.g., that modulates the two-dimensional structure of chromatin (i.e., that modulate structure of chromatin in a way that would alter its two-dimensional representation).

[0202] Epigenetic modifying moieties useful in methods and compositions of the present disclosure include agents that affect epigenetic markers, e.g., DNA methylation, histone methylation, histone acetylation, histone sumoylation, histone phosphorylation, and RNA-associated silencing. Exemplary epigenetic enzymes that can be targeted to a genomic sequence element as described herein include DNA methylases (e.g., DNMT3a, DNMT3b, DNMTL, MQ1), DNA demethylation (e.g., the TET family), histone methyltransferases, histone deacetylase (e.g., HDAC1, HDAC2, HDAC3), sirtuin 1, 2, 3, 4, 5, 6, or 7, lysine-specific histone demethylase 1 (LSD1), histone-lysine-N-methyltransferase (Setdb1), euchromatic histone-lysine N-methyltransferase 2 (G9a), histone-lysine N-methyltransferase (SUV39H1), enhancer of zeste homolog 2 (EZH2), viral lysine methyltransferase (vSET), histone methyltransferase (SET2), and protein-lysine N-methyltransferase (SMYD2). Examples of such epigenetic modifying agents are described, e.g., in de Groote et al. Nuc. Acids Res. (2012):1-18.

[0203] In some embodiments, a site-specific disrupting agent, e.g., comprising an epigenetic modifying moiety, useful herein comprises or is a construct described in Koferle et al. Genome Medicine 7.59 (2015):1-3 incorporated herein by reference. For example, in some embodiments, a site-specific disrupting agent comprises or is a construct found in Table 1 of Koferle et al., e.g., histone deacetylase, histone methyltransferase, DNA demethylation, or H3K4 and/or H3K9 histone demethylase described in Table 1 (e.g., dCas9-p300, TALE-TET1, ZF-DNMT3A, or TALE-LSD1).

[0204] Additional Moieties

[0205] A site-specific disrupting agent may further comprise one or more additional moieties (e.g., in addition to one or more targeting moieties and one or more effector moieties). In some embodiments, an additional moiety is selected from a tagging or monitoring moiety, a cleavable moiety (e.g., a cleavable moiety positioned between a targeting moiety and an effector moiety or at the N- or C-terminal end of a polypeptide), a small molecule, a membrane translocating polypeptide, or a pharmacoagent moiety.

### Exemplary Site-Specific Disrupting Agents

[0206] The following exemplary site-specific disrupting agents are presented for illustration purposes only and are not intended to be limiting.

[0207] In some embodiments, a site-specific disrupting agent comprises a targeting moiety (e.g., comprising dCas9, e.g., an S. aureus dCas9), and an effector moiety comprising MQ1, e.g., bacterial MQ1. In some embodiments, the site-specific disrupting agent is encoded by the nucleic acid sequence of SEQ ID NOs: 201 (e.g., a plasmid encoding the site-specific disrupting agent), and/or 202 (e.g., a nucleic acid (e.g., mRNA) encoding the site-specific disrupting agent), encoding the site-specific disrupting agent). In some embodiments, a nucleic acid described herein comprises a nucleic acid sequence of SEQ ID NO: 201 or 202 or a sequence with at least 80, 85, 90, 95, 99, or 100% identity thereto, or having no more than 20, 19, 18, 17, 16, 15, 14, 13, 12, 11, 10, 9, 8, 7, 6, 5, 4, 3, 2, or 1 positions of difference thereto. In some embodiments, the targeting moiety is encoded by the nucleic acid sequence of SEQ ID NO: 9 and/or the effector moiety is encoded by the nucleic acid sequence of SEQ ID NO: 10.

Sa-dCas9-MQ1 (PL-27695) Plasmid DNA sequence:
(SEQ ID NO: 201)
TCGCGCGTTTCGGTGATGACGGTGAAAACCTCTGACACAT
GCAGCTCCCGGAGACGGTCACAGCTTGTCTGTAAGCGGAT
GCCGGGAGCAGACAAGCCCGTCAGGGCGCGTCAGCGGGTG
TTGGCGGGTGTCGGGGCTGGCTTAACTATGCGGCATCAGA
GCAGATTGTACTGAGAGTGCACCATATGCGGTGTGAAATA
CCGCACAGATGCGTAAGGAGAAAATACCGCATCAGGCGCC
ATTCGCCATTCAGGCTGCGCAACTGTTGGGAAGGGCGATC
GGTGCGGGCCTCTTCGCTATTACGCCAGCTGGCGAAAGGG
GGATGTGCTGCAAGGCGATTAAGTTGGGTAACGCCAGGGT
TTTCCCAGTCACGACGTTGTAAAACGACGGCCAGTGAATT
GACGCGTATTGGGATGGTACCTAATACGACTCACTATAAG
GAAATAAGAGAGAAAAGAAGAGTAAGAAGAAATATAAGAG
CCACCATGGCCCCCAAGAAGAAGCGGAAGGTGGGCATCCA
CGGCGTGCCCGCCGCCGCCAAGCGGAACTACATCCTGGGC
CTGGCCATCGGCATCACCAGCGTGGGCTACGGCATCATCG
ACTACGAGACCCGGGACGTGATCGACGCCGGCGTGCGGCT
GTTCAAGGAGGCCAACGTGGAGAACAACGAGGGCCGGCGG
AGCAAGCGGGGCGCCCGGCGGCTGAAGCGGCGGCGGCGGC
ACCGGATCCAGCGGGTGAAGAAGCTGCTGTTCGACTACAA
CCTGCTGACCGACCACAGCGAGCTGAGCGGCATCAACCCC
TACGAGGCCCGGGTGAAGGGCCTGAGCCAGAAGCTGAGCG
AGGAGGAGTTCAGCGCCGCCCTGCTGCACCTGGCCAAGCG
GCGGGGCGTGCACAACGTGAACGAGGTGGAGGAGGACACC
GGCAACGAGCTGAGCACCAAGGAGCAGATCAGCCGGAACA
GCAAGGCCCTGGAGGAGAAGTACGTGGCCGAGCTGCAGCT
GGAGCGGCTGAAGAAGGACGGCGAGGTGCGGGGCAGCATC
AACCGGTTCAAGACCAGCGACTACGTGAAGGAGGCCAAGC
AGCTGCTGAAGGTGCAGAAGGCCTACCACCAGCTGGACCA
GAGCTTCATCGACACCTACATCGACCTGCTGGAGACCCGG
CGGACCTACTACGAGGGCCCCGGCGAGGGCAGCCCCTTCG
GCTGGAAGGACATCAAGGAGTGGTACGAGATGCTGATGGG
CCACTGCACCTACTTCCCCGAGGAGCTGCGGAGCGTGAAG
TACGCCTACAACGCCGACCTGTACAACGCCCTGAACGACC
TGAACAACCTGGTGATCACCCGGGACGAGAACGAGAAGCT
GGAGTACTACGAGAAGTTCCAGATCATCGAGAACGTGTTC
AAGCAGAAGAAGAAGCCCACCCTGAAGCAGATCGCCAAGG
AGATCCTGGTGAACGAGGAGGACATCAAGGGCTACCGGGT
GACCAGCACCGGCAAGCCCGAGTTCACCAACCTGAAGGTG
TACCACGACATCAAGGACATCACCGCCCGGAAGGAGATCA
TCGAGAACGCCGAGCTGCTGGACCAGATCGCCAAGATCCT
GACCATCTACCAGAGCAGCGAGGACATCCAGGAGGAGCTG
ACCAACCTGAACAGCGAGCTGACCCAGGAGGAGATCGAGC
AGATCAGCAACCTGAAGGGCTACACCGGCACCCACAACCT
GAGCCTGAAGGCCATCAACCTGATCCTGGACGAGCTGTGG
CACACCAACGACAACCAGATCGCCATCTTCAACCGGCTGA
AGCTGGTGCCCAAGAAGGTGGACCTGAGCCAGCAGAAGGA
GATCCCCACCACCCTGGTGGACGACTTCATCCTGAGCCCC
GTGGTGAAGCGGAGCTTCATCCAGAGCATCAAGGTGATCA
ACGCCATCATCAAGAAGTACGGCCTGCCCAACGACATCAT
CATCGAGCTGGCCCGGGAGAAGAACAGCAAGGACGCCCAG
AAGATGATCAACGAGATGCAGAAGCGGAACCGGCAGACCA
ACGAGCGGATCGAGGAGATCATCCGGACCACCGGCAAGGA
GAACGCCAAGTACCTGATCGAGAAGATCAAGCTGCACGAC
ATGCAGGAGGGCAAGTGCCTGTACAGCCTGGAGGCCATCC
CCCTGGAGGACCTGCTGAACAACCCCTTCAACTACGAGGT
GGACGCCATCATCCCCCGGAGCGTGAGCTTCGACAACAGC
TTCAACAACAAGGTGCTGGTGAAGCAGGAGGAGAACAGCA
AGAAGGGCAACCGGACCCCCTTCCAGTACCTGAGCAGCAG
CGACAGCAAGATCAGCTACGAGACCTTCAAGAAGCACATC
CTGAACCTGGCCAAGGGCAAGGGCCGGATCAGCAAGACCA
AGAAGGAGTACCTGCTGGAGGAGCGGGACATCAACCGGTT
CAGCGTGCAGAAGGACTTCATCAACCGGAACCTGGTGGAC
ACCCGGTACGCCACCCGGGGCCTGATGAACCTGCTGCGGA
GCTACTTCCGGGTGAACAACCTGGACGTGAAGGTGaaatc
cATCAACGGCGGCTTCACCAGCTTCCTGCGGCGGAAGTGG
AAGTTCAAGAAGGAGCGGAACAAGGGCTACAAGCACCACG
CCGAGGACGCCCTGATCATCGCCAACGCCGACTTCATCTT
CAAGGAGTGGAAGAAGCTGGACAAGGCCAAGAAGGTGATG
GAGAACCAGATGTTCGAGGAGAAGCAGGCCGAGAGCATGC
CCGAGATCGAGACCGAGCAGGAGTACAAGGAGATCTTCAT
CACCCCCCACCAGATCAAGCACATCAAGGACTTCAAGGAC
TACAAGTACAGCCACCGGGTGGACAAGAAGCCCAACCGGA
AGCTGATCAACGACACCCTGTACAGCACCCGGAAGGACGA
CAAGGGCAACACCCTGATCGTGAACAACCTGAACGGCCTG
TACGACAAGGACAACGACAAGCTGAAGAAGCTGATCAACA
AGAGCCCCGAGAAGCTGCTGATGTACCACCACGACCCCCA
GACCTACCAGAAGCTGAAGCTGATCATGGAGCAGTACGGC
GACGAGAAGAACCCCCTGTACAAGTACTACGAGGAGACCG
GCAACTACCTGACCAAGTACAGCAAGAAGGACAACGGCCC
CGTGATCAAGAAGATCAAGTACTACGGCAACAAGCTGAAC
GCCCACCTGGACATCACCGACGACTACCCCAACAGCCGGA
ACAAGGTGGTGAAGCTGAGCCTGAAGCCCTACCGGTTCGA
CGTGTACCTGGACAACGGCGTGTACAAGTTCGTGACCGTG
AAGAACCTGGACGTGATCAAGAAGGAGAACTACTACGAGG
TGAACAGCAAGTGCTACGAGGAGGCCAAGAAGCTGAAGAA
GATCAGCAACCAGGCCGAGTTCATCGCCAGCTTCTACAAG
AACGACCTGATCAAGATCAACGGCGAGCTGTACCGGGTGA
TCGGCGTGAACAACGACCTGCTGAACCGGATCGAGGTGAA
CATGATCGACATCACCTACCGGGAGTACCTGGAGAACATG
AACGACAAGCGGCCCCCCCACATCATCAAGACCATCGCCA
GCAAGACCCAGAGCATCAAGAAGTACAGCACCGACATCCT
GGGCAACCTGTACGAGGTGaaatccAAGAAGCACCCCCAG
ATCATCAAGAAGGGCAAGCGGCCCGCCGCCACCAAGAAGG
CCGGCCAGGCCAAGAAGAAGAAGGCCCGGGACAGCAAGGT
GGAGAACAAGACCAAGAAGCTGCGGGTGTTCGAGGCCTTC
GCCGGCATCGGCGCCCAGCGGAAGGCCCTGGAGAAGGTGC
GGAAGGACGAGTACGAGATCGTGGGCCTGGCCGAGTGGTA
CGTGCCCGCCATCGTGATGTACCAGGCCATCCACAACAAC
TTCCACACCAAGCTGGAGTACAAGAGCGTGAGCCGGGAGG
AGATGATCGACTACCTGGAGAACAAGACCCTGAGCTGGAA
CAGCAAGAACCCCGTGAGCAACGGCTACTGGAAGCGGAAG
AAGGACGACGAGCTGAAGATCATCTACAACGCCATCAAGC
TGAGCGAGAAGGAGGGCAACATCTTCGACATCCGGGACCT
GTACAAGCGGACCCTGAAGAACATCGACCTGCTGACCTAC
AGCTTCCCCTGCCAGGACCTGAGCCAGCAGGGCATCCAGA
AGGGCATGAAGCGGGGCAGCGGCACCCGGAGCGGCCTGCT
GTGGGAGATCGAGCGGGCCCTGGACAGCACCGAGAAGAAC
GACCTGCCCAAGTACCTGCTGATGGAGAACGTGGGCGCCC
TGCTGCACAAGAAGAACGAGGAGGAGCTGAACCAGTGGAA
GCAGAAGCTGGAGAGCCTGGGCTACCAGAACAGCATCGAG
GTGCTGAACGCCGCCGACTTCGGCAGCAGCCAGGCCCGGC
GGCGGGTGTTCATGATCAGCACCCTGAACGAGTTCGTGGA
GCTGCCCAAGGGCGACAAGAAGCCCAAGAGCATCAAGAAG
GTGCTGAACAAGATCGTGAGCGAGAAGGACATCCTGAACA
ACCTGCTGAAGTACAACCTGACCGAGTTCAAGAAaACCAA
GAGCAACATCAACAAGGCCAGCCTGATCGGCTACAGCAAG
TTCAACAGCGAGGGCTACGTGTACGACCCCGAGTTCACCG
GCCCCACCCTGACCGCCAGCGGCGCCAACAGCCGGATCAA
GATCAAGGACGGCAGCAACATCCGGAAGATGAACAGCGAC
GAGACCTTCCTGTACATCGGCTTCGACAGCCAGGACGGCA
AGCGGGTGAACGAGATCGAGTTCCTGACCGAGAACCAGAA
GATCTTCGTGTGCGGCAACAGCATCAGCGTGGAGGTGCTG
GAGGCCATCATCGACAAGATCGGCGGCCCCAGCAGCGGCG
GCAAGCGGCCCGCCGCCACCAAGAAGGCCGGCCAGGCCAA
GAAGAAGAAGGGCAGCTACCCCTACGACGTGCCCGACTAC
GCCTGAGcggccgcttaattaagctgccttctgcggggct
tgccttctggccatgcccttcttctctcccttgcacctgt
acctcttggtctttgaataaagectgagtaggaagtctag
aaaaaaaaaaaaaaaaaaaaaaaaaaaaaaaaaaaaaaaa
aaaaaaaaaaaaaaaaaaaaaaaaaaaaaaaaaaaaaaaa
ttgtcttcttcatcgcctgcagATCCCAATGGCGCGCCGA
GCTTGGCTCGAGCATGGTCATAGCTGTTTCCTGTGTGAAA
TTGTTATCCGCTCACAATTCCACACAACATACGAGCCGGA
AGCATAAAGTGTAAAGCCTGGGGTGCCTAATGAGTGAGCT
AACTCACATTAATTGCGTTGCGCTCACTGCCCGCTTTCCA
GTCGGGAAACCTGTCGTGCCAGCTGCATTAATGAATCGGC
CAACGCGCGGGGAGAGGCGGTTTGCGTATTGGGCGCTCTT
CCGCTTCCTCGCTCACTGACTCGCTGCGCTCGGTCGTTCG
GCTGCGGCGAGCGGTATCAGCTCACTCAAAGGCGGTAATA
CGGTTATCCACAGAATCAGGGGATAACGCAGGAAAGAACA
TGTGAGCAAAAGGCCAGCAAAAGGCCAGGAACCGTAAAAA
GGCCGCGTTGCTGGCGTTTTTCCATAGGCTCCGCCCCCCT
GACGAGCATCACAAAAATCGACGCTCAAGTCAGAGGTGGC
GAAACCCGACAGGACTATAAAGATACCAGGCGTTTCCCCC
TGGAAGCTCCCTCGTGCGCTCTCCTGTTCCGACCCTGCCG
CTTACCGGATACCTGTCCGCCTTTCTCCCTTCGGGAAGCG
TGGCGCTTTCTCATAGCTCACGCTGTAGGTATCTCAGTTC
GGTGTAGGTCGTTCGCTCCAAGCTGGGCTGTGTGCACGAA
CCCCCCGTTCAGCCCGACCGCTGCGCCTTATCCGGTAACT
ATCGTCTTGAGTCCAACCCGGTAAGACACGACTTATCGCC
ACTGGCAGCAGCCACTGGTAACAGGATTAGCAGAGCGAGG
TATGTAGGCGGTGCTACAGAGTTCTTGAAGTGGTGGCCTA
ACTACGGCTACACTAGAAGAACAGTATTTGGTATCTGCGC
TCTGCTGAAGCCAGTTACCTTCGGAAAAAGAGTTGGTAGC
TCTTGATCCGGCAAACAAACCACCGCTGGTAGCGGTGGTT
TTTTTGTTTGCAAGCAGCAGATTACGCGCAGAAAAAAAGG
ATCTCAAGAAGATCCTTTGATCTTTTCTACGGGGTCTGAC
GCTCAGTGGAACGAAAACTCACGTTAAGGGATTTTGGTCA
TGAGATTATCAAAAAGGATCTTCACCTAGATCCTTTTAAA
TTAAAAATGAAGTTTTAAATCAATCTAAAGTATATATGAG
TAAACTTGGTCTGACAGTTAGAAAAACTCATCGAGCATCA
AATGAAACTGCAATTTATTCATATCAGGATTATCAATACC
ATATTTTTGAAAAAGCCGTTTCTGTAATGAAGGAGAAAAC
TCACCGAGGCAGTTCCATAGGATGGCAAGATCCTGGTATC
GGTCTGCGATTCCGACTCGTCCAACATCAATACAACCTAT
TAATTTCCCCTCGTCAAAAATAAGGTTATCAAGTGAGAAA
TCACCATGAGTGACGACTGAATCCGGTGAGAATGGCAAAA
GTTTATGCATTTCTTTCCAGACTTGTTCAACAGGCCAGCC
ATTACGCTCGTCATCAAAATCACTCGCATCAACCAAACCG
TTATTCATTCGTGATTGCGCCTGAGCGAGACGAAATACGC
GATCGCTGTTAAAAGGACAATTACAAACAGGAATCGAATG
CAACCGGCGCAGGAACACTGCCAGCGCATCAACAATATTT
TCACCTGAATCAGGATATTCTTCTAATACCTGGAATGCTG
TTTTCCCAGGGATCGCAGTGGTGAGTAACCATGCATCATC
AGGAGTACGGATAAAATGCTTGATGGTCGGAAGAGGCATA
AATTCCGTCAGCCAGTTTAGTCTGACCATCTCATCTGTAA
CATCATTGGCAACGCTACCTTTGCCATGTTTCAGAAACAA
CTCTGGCGCATCGGGCTTCCCATACAATCGATAGATTGTC
GCACCTGATTGCCCGACATTATCGCGAGCCCATTTATACC
CATATAAATCAGCATCCATGTTGGAATTTAATCGCGGCCT
AGAGCAAGACGTTTCCCGTTGAATATGGCTCATACTCTTC
CTTTTTCAATATTATTGAAGCATTTATCAGGGTTATTGTC
TCATGAGCGGATACATATTTGAATGTATTTAGAAAAATAA
ACAAATAGGGGTTCCGCGCACATTTCCCCGAAAAGTGCCA
CCTGACGTCTAAGAAACCATTATTATCATGACATTAACCT
ATAAAAATAGGCGTATCACGAGGCCCTTTCGTC
Sa-dCas9-MQ1 (MR-28126) Expressed mRNA sequence:
(SEQ ID NO: 202)
AGGAAATAAGAGAGAAAAGAAGAGTAAGAAGAAATATAAGA
GCCACCATGGCCCCCAAGAAGAAGCGGAAGGTGGGCATCC
ACGGCGTGCCCGCCGCCGCCAAGCGGAACTACATCCTGGG
CCTGGCCATCGGCATCACCAGCGTGGGCTACGGCATCATC
GACTACGAGACCCGGGACGTGATCGACGCCGGCGTGCGGC
TGTTCAAGGAGGCCAACGTGGAGAACAACGAGGGCCGGCG
GAGCAAGCGGGGCGCCCGGCGGCTGAAGCGGCGGCGGCGG
CACCGGATCCAGCGGGTGAAGAAGCTGCTGTTCGACTACA
ACCTGCTGACCGACCACAGCGAGCTGAGCGGCATCAACCC
CTACGAGGCCCGGGTGAAGGGCCTGAGCCAGAAGCTGAGC
GAGGAGGAGTTCAGCGCCGCCCTGCTGCACCTGGCCAAGC
GGCGGGGCGTGCACAACGTGAACGAGGTGGAGGAGGACAC
CGGCAACGAGCTGAGCACCAAGGAGCAGATCAGCCGGAAC
AGCAAGGCCCTGGAGGAGAAGTACGTGGCCGAGCTGCAGC
TGGAGCGGCTGAAGAAGGACGGCGAGGTGCGGGGCAGCAT
CAACCGGTTCAAGACCAGCGACTACGTGAAGGAGGCCAAG
CAGCTGCTGAAGGTGCAGAAGGCCTACCACCAGCTGGACC
AGAGCTTCATCGACACCTACATCGACCTGCTGGAGACCCG
GCGGACCTACTACGAGGGCCCCGGCGAGGGCAGCCCCTTC
GGCTGGAAGGACATCAAGGAGTGGTACGAGATGCTGATGG
GCCACTGCACCTACTTCCCCGAGGAGCTGCGGAGCGTGAA
GTACGCCTACAACGCCGACCTGTACAACGCCCTGAACGAC
CTGAACAACCTGGTGATCACCCGGGACGAGAACGAGAAGC
TGGAGTACTACGAGAAGTTCCAGATCATCGAGAACGTGTT
CAAGCAGAAGAAGAAGCCCACCCTGAAGCAGATCGCCAAG
GAGATCCTGGTGAACGAGGAGGACATCAAGGGCTACCGGG
TGACCAGCACCGGCAAGCCCGAGTTCACCAACCTGAAGGT
GTACCACGACATCAAGGACATCACCGCCCGGAAGGAGATC
ATCGAGAACGCCGAGCTGCTGGACCAGATCGCCAAGATCC
TGACCATCTACCAGAGCAGCGAGGACATCCAGGAGGAGCT
GACCAACCTGAACAGCGAGCTGACCCAGGAGGAGATCGAG
CAGATCAGCAACCTGAAGGGCTACACCGGCACCCACAACC
TGAGCCTGAAGGCCATCAACCTGATCCTGGACGAGCTGTG
GCACACCAACGACAACCAGATCGCCATCTTCAACCGGCTG
AAGCTGGTGCCCAAGAAGGTGGACCTGAGCCAGCAGAAGG
AGATCCCCACCACCCTGGTGGACGACTTCATCCTGAGCCC
CGTGGTGAAGCGGAGCTTCATCCAGAGCATCAAGGTGATC
AACGCCATCATCAAGAAGTACGGCCTGCCCAACGACATCA
TCATCGAGCTGGCCCGGGAGAAGAACAGCAAGGACGCCCA
GAAGATGATCAACGAGATGCAGAAGCGGAACCGGCAGACC
AACGAGCGGATCGAGGAGATCATCCGGACCACCGGCAAGG
AGAACGCCAAGTACCTGATCGAGAAGATCAAGCTGCACGA
CATGCAGGAGGGCAAGTGCCTGTACAGCCTGGAGGCCATC
CCCCTGGAGGACCTGCTGAACAACCCCTTCAACTACGAGG
TGGACGCCATCATCCCCCGGAGCGTGAGCTTCGACAACAG
CTTCAACAACAAGGTGCTGGTGAAGCAGGAGGAGAACAGC
AAGAAGGGCAACCGGACCCCCTTCCAGTACCTGAGCAGCA
GCGACAGCAAGATCAGCTACGAGACCTTCAAGAAGCACAT
CCTGAACCTGGCCAAGGGCAAGGGCCGGATCAGCAAGACC
AAGAAGGAGTACCTGCTGGAGGAGCGGGACATCAACCGGT
TCAGCGTGCAGAAGGACTTCATCAACCGGAACCTGGTGGA
CACCCGGTACGCCACCCGGGGCCTGATGAACCTGCTGCGG
AGCTACTTCCGGGTGAACAACCTGGACGTGAAGGTGaaat
ccATCAACGGCGGCTTCACCAGCTTCCTGCGGCGGAAGTG
GAAGTTCAAGAAGGAGCGGAACAAGGGCTACAAGCACCAC
GCCGAGGACGCCCTGATCATCGCCAACGCCGACTTCATCT
TCAAGGAGTGGAAGAAGCTGGACAAGGCCAAGAAGGTGAT
GGAGAACCAGATGTTCGAGGAGAAGCAGGCCGAGAGCATG
CCCGAGATCGAGACCGAGCAGGAGTACAAGGAGATCTTCA
TCACCCCCCACCAGATCAAGCACATCAAGGACTTCAAGGA
CTACAAGTACAGCCACCGGGTGGACAAGAAGCCCAACCGG
AAGCTGATCAACGACACCCTGTACAGCACCCGGAAGGACG
ACAAGGGCAACACCCTGATCGTGAACAACCTGAACGGCCT
GTACGACAAGGACAACGACAAGCTGAAGAAGCTGATCAAC
AAGAGCCCCGAGAAGCTGCTGATGTACCACCACGACCCCC
AGACCTACCAGAAGCTGAAGCTGATCATGGAGCAGTACGG
CGACGAGAAGAACCCCCTGTACAAGTACTACGAGGAGACC
GGCAACTACCTGACCAAGTACAGCAAGAAGGACAACGGCC
CCGTGATCAAGAAGATCAAGTACTACGGCAACAAGCTGAA
CGCCCACCTGGACATCACCGACGACTACCCCAACAGCCGG
AACAAGGTGGTGAAGCTGAGCCTGAAGCCCTACCGGTTCG
ACGTGTACCTGGACAACGGCGTGTACAAGTTCGTGACCGT
GAAGAACCTGGACGTGATCAAGAAGGAGAACTACTACGAG
GTGAACAGCAAGTGCTACGAGGAGGCCAAGAAGCTGAAGA
AGATCAGCAACCAGGCCGAGTTCATCGCCAGCTTCTACAA
GAACGACCTGATCAAGATCAACGGCGAGCTGTACCGGGTG
ATCGGCGTGAACAACGACCTGCTGAACCGGATCGAGGTGA
ACATGATCGACATCACCTACCGGGAGTACCTGGAGAACAT
GAACGACAAGCGGCCCCCCCACATCATCAAGACCATCGCC
AGCAAGACCCAGAGCATCAAGAAGTACAGCACCGACATCC
TGGGCAACCTGTACGAGGTGaaatccAAGAAGCACCCCCA
GATCATCAAGAAGGGCAAGCGGCCCGCCGCCACCAAGAAG
GCCGGCCAGGCCAAGAAGAAGAAGGCCCGGGACAGCAAGG
TGGAGAACAAGACCAAGAAGCTGCGGGTGTTCGAGGCCTT
CGCCGGCATCGGCGCCCAGCGGAAGGCCCTGGAGAAGGTG
CGGAAGGACGAGTACGAGATCGTGGGCCTGGCCGAGTGGT
ACGTGCCCGCCATCGTGATGTACCAGGCCATCCACAACAA
CTTCCACACCAAGCTGGAGTACAAGAGCGTGAGCCGGGAG
GAGATGATCGACTACCTGGAGAACAAGACCCTGAGCTGGA
ACAGCAAGAACCCCGTGAGCAACGGCTACTGGAAGCGGAA
GAAGGACGACGAGCTGAAGATCATCTACAACGCCATCAAG
CTGAGCGAGAAGGAGGGCAACATCTTCGACATCCGGGACC
TGTACAAGCGGACCCTGAAGAACATCGACCTGCTGACCTA
CAGCTTCCCCTGCCAGGACCTGAGCCAGCAGGGCATCCAG
AAGGGCATGAAGCGGGGCAGCGGCACCCGGAGCGGCCTGC
TGTGGGAGATCGAGCGGGCCCTGGACAGCACCGAGAAGAA
CGACCTGCCCAAGTACCTGCTGATGGAGAACGTGGGCGCC
CTGCTGCACAAGAAGAACGAGGAGGAGCTGAACCAGTGGA
AGCAGAAGCTGGAGAGCCTGGGCTACCAGAACAGCATCGA
GGTGCTGAACGCCGCCGACTTCGGCAGCAGCCAGGCCCGG
CGGCGGGTGTTCATGATCAGCACCCTGAACGAGTTCGTGG
AGCTGCCCAAGGGCGACAAGAAGCCCAAGAGCATCAAGAA
GGTGCTGAACAAGATCGTGAGCGAGAAGGACATCCTGAAC
AACCTGCTGAAGTACAACCTGACCGAGTTCAAGAAaACCA
AGAGCAACATCAACAAGGCCAGCCTGATCGGCTACAGCAA
GTTCAACAGCGAGGGCTACGTGTACGACCCCGAGTTCACC
GGCCCCACCCTGACCGCCAGCGGCGCCAACAGCCGGATCA
AGATCAAGGACGGCAGCAACATCCGGAAGATGAACAGCGA
CGAGACCTTCCTGTACATCGGCTTCGACAGCCAGGACGGC
AAGCGGGTGAACGAGATCGAGTTCCTGACCGAGAACCAGA
AGATCTTCGTGTGCGGCAACAGCATCAGCGTGGAGGTGCT
GGAGGCCATCATCGACAAGATCGGCGGCCCCAGCAGCGGC
GGCAAGCGGCCCGCCGCCACCAAGAAGGCCGGCCAGGCCA
AGAAGAAGAAGGGCAGCTACCCCTACGACGTGCCCGACTA
CGCCTGAGcggccgcttaattaagctgccttctgcggggc
ttgccttctggccatgcccttcttctctcccttgcacctg
tacctcttggtctttgaataaagcctgagtaggaagtcta
gaaaaaaaaaaaaaaaaaaaaaaaaaaaaaaaaaaaaaaa
aaaaaaaaaaaaaaaaaaaaaaaaaaaaaaaaaaaaaaaa
a

[0208] In some embodiments, a site-specific disrupting agent comprises a targeting moiety (e.g., comprising dCas9, e.g., an S. Pyogenes dCas9 or a functional variant or mutant thereof; e.g., Cas9m4), and an effector moiety comprising MQ1, e.g., bacterial MQ1. In some embodiments, the site-specific disrupting agent is encoded by the nucleic acid sequence of SEQ ID NOs: 207 (e.g., a nucleic acid (e.g., mRNA) encoding the site-specific disrupting agent). In some embodiments, a nucleic acid described herein comprises a nucleic acid sequence of SEQ ID NO: 207 or a sequence with at least 80, 85, 90, 95, 99, or 100% identity thereto, or having no more than 20, 19, 18, 17, 16, 15, 14, 13, 12, 11, 10, 9, 8, 7, 6, 5, 4, 3, 2, or 1 positions of difference thereto. In some embodiments, the targeting moiety is encoded by the nucleic acid sequence of SEQ ID NO: 8 and/or the effector moiety is encoded by the nucleic acid sequence of SEQ ID NO: 10.

dCas9-MQ1 mRNA sequence (MR28125)
(SEQ ID NO: 207)
AAGGAAAUAAGAGAGAAAAGAAGAGUAAGAAGAAAUAUAAGAGCCACCAUGGCCCCCAA
GAAGAAGCGGAAGGUGGGCAUCCACGGCGUGCCCGCCGCCGACAAGAAGUACAGCAUCGG
CCUGGCCAUCGGCACCAACAGCGUGGGCUGGGCCGUGAUCACCGACGAGUACAAGGUGCC
CAGCAAGAAGUUCAAGGUGCUGGGCAACACCGACCGGCACAGCAUCAAGAAGAACCUGAU
CGGCGCCCUGCUGUUCGACAGCGGCGAGACCGCCGAGGCCACCCGGCUGAAGCGGACCGC
CCGGCGGCGGUACACCCGGCGGAAGAACCGGAUCUGCUACCUGCAGGAGAUCUUCAGCAA
CGAGAUGGCCAAGGUGGACGACAGCUUCUUCCACCGGCUGGAGGAGAGCUUCCUGGUGGA
GGAGGACAAGAAGCACGAGCGGCACCCCAUCUUCGGCAACAUCGUGGACGAGGUGGCCUA
CCACGAGAAGUACCCCACCAUCUACCACCUGCGGAAGAAGCUGGUGGACAGCACCGACAA
GGCCGACCUGCGGCUGAUCUACCUGGCCCUGGCCCACAUGAUCAAGUUCCGGGGCCACUU
CCUGAUCGAGGGCGACCUGAACCCCGACAACAGCGACGUGGACAAGCUGUUCAUCCAGCU
GGUGCAGACCUACAACCAGCUGUUCGAGGAGAACCCCAUCAACGCCAGCGGCGUGGACGC
CAAGGCCAUCCUGAGCGCCCGGCUGAGCAAGAGCCGGCGGCUGGAGAACCUGAUCGCCCA
GCUGCCCGGCGAGAAGAAGAACGGCCUGUUCGGCAACCUGAUCGCCCUGAGCCUGGGCCU
GACCCCCAACUUCAAGAGCAACUUCGACCUGGCCGAGGACGCCAAGCUGCAGCUGAGCAA
GGACACCUACGACGACGACCUGGACAACCUGCUGGCCCAGAUCGGCGACCAGUACGCCGA
CCUGUUCCUGGCCGCCAAGAACCUGAGCGACGCCAUCCUGCUGAGCGACAUCCUGCGGGU
GAACACCGAGAUCACCAAGGCCCCCCUGAGCGCCAGCAUGAUCAAGCGGUACGACGAGCA
CCACCAGGACCUGACCCUGCUGAAGGCCCUGGUGCGGCAGCAGCUGCCCGAGAAGUACAA
GGAGAUCUUCUUCGACCAGAGCAAGAACGGCUACGCCGGCUACAUCGACGGCGGCGCCAG
CCAGGAGGAGUUCUACAAGUUCAUCAAGCCCAUCCUGGAGAAGAUGGACGGCACCGAGGA
GCUGCUGGUGAAGCUGAACCGGGAGGACCUGCUGCGGAAGCAGCGGACCUUCGACAACGG
CAGCAUCCCCCACCAGAUCCACCUGGGCGAGCUGCACGCCAUCCUGCGGCGGCAGGAGGA
CUUCUACCCCUUCCUGAAGGACAACCGGGAGAAGAUCGAGAAGAUCCUGACCUUCCGGAU
CCCCUACUACGUGGGCCCCCUGGCCCGGGGCAACAGCCGGUUCGCCUGGAUGACCCGGAA
AUCCGAGGAGACCAUCACCCCCUGGAACUUCGAGGAGGUGGUGGACAAGGGCGCCAGCGC
CCAGAGCUUCAUCGAGCGGAUGACCAACUUCGACAAGAACCUGCCCAACGAGAAGGUGCU
GCCCAAGCACAGCCUGCUGUACGAGUACUUCACCGUGUACAACGAGCUGACCAAGGUGAA
GUACGUGACCGAGGGCAUGCGGAAGCCCGCCUUCCUGAGCGGCGAGCAGAAGAAGGCCAU
CGUGGACCUGCUGUUCAAGACCAACCGGAAGGUGACCGUGAAGCAGCUGAAGGAGGACU
ACUUCAAGAAGAUCGAGUGCUUCGACAGCGUGGAGAUCAGCGGCGUGGAGGACCGGUUC
AACGCCAGCCUGGGCACCUACCACGACCUGCUGAAGAUCAUCAAGGACAAGGACUUCCUG
GACAACGAGGAGAACGAGGACAUCCUGGAGGACAUCGUGCUGACCCUGACCCUGUUCGAG
GACCGGGAGAUGAUCGAGGAGCGGCUGAAAACCUACGCCCACCUGUUCGACGACAAGGUG
AUGAAGCAGCUGAAGCGGCGGCGGUACACCGGCUGGGGCCGGCUGAGCCGGAAGCUGAUC
AACGGCAUCCGGGACAAGCAGAGCGGCAAGACCAUCCUGGACUUCCUGAAAUCCGACGGC
UUCGCCAACCGGAACUUCAUGCAGCUGAUCCACGACGACAGCCUGACCUUCAAGGAGGAC
AUCCAGAAGGCCCAGGUGAGCGGCCAGGGCGACAGCCUGCACGAGCACAUCGCCAACCUG
GCCGGCAGCCCCGCCAUCAAGAAGGGCAUCCUGCAGACCGUGAAGGUGGUGGACGAGCUG
GUGAAGGUGAUGGGCCGGCACAAGCCCGAGAACAUCGUGAUCGAGAUGGCCCGGGAGAA
CCAGACCACCCAGAAGGGCCAGAAGAACAGCCGGGAGCGGAUGAAGCGGAUCGAGGAGGG
CAUCAAGGAGCUGGGCAGCCAGAUCCUGAAGGAGCACCCCGUGGAGAACACCCAGCUGCA
GAACGAGAAGCUGUACCUGUACUACCUGCAGAACGGCCGGGACAUGUACGUGGACCAGGA
GCUGGACAUCAACCGGCUGAGCGACUACGACGUGGCCGCCAUCGUGCCCCAGAGCUUCCU
GAAGGACGACAGCAUCGACAACAAGGUGCUGACCCGGAGCGACAAGGCCCGGGGCAAGAG
CGACAACGUGCCCAGCGAGGAGGUGGUGAAGAAGAUGAAGAACUACUGGCGGCAGCUGC
UGAACGCCAAGCUGAUCACCCAGCGGAAGUUCGACAACCUGACCAAGGCCGAGCGGGGCG
GCCUGAGCGAGCUGGACAAGGCCGGCUUCAUCAAGCGGCAGCUGGUGGAGACCCGGCAGA
UCACCAAGCACGUGGCCCAGAUCCUGGACAGCCGGAUGAACACCAAGUACGACGAGAACG
ACAAGCUGAUCCGGGAGGUGAAGGUGAUCACCCUGAAAUCCAAGCUGGUGAGCGACUUCC
GGAAGGACUUCCAGUUCUACAAGGUGCGGGAGAUCAACAACUACCACCACGCCCACGACG
CCUACCUGAACGCCGUGGUGGGCACCGCCCUGAUCAAGAAGUACCCCAAGCUGGAGAGCG
AGUUCGUGUACGGCGACUACAAGGUGUACGACGUGCGGAAGAUGAUCGCCAAGAGCGAG
CAGGAGAUCGGCAAGGCCACCGCCAAGUACUUCUUCUACAGCAACAUCAUGAACUUCUUC
AAGACCGAGAUCACCCUGGCCAACGGCGAGAUCCGGAAGCGGCCCCUGAUCGAGACCAAC
GGCGAGACCGGCGAGAUCGUGUGGGACAAGGGCCGGGACUUCGCCACCGUGCGGAAGGUG
CUGAGCAUGCCCCAGGUGAACAUCGUGAAGAAAACCGAGGUGCAGACCGGCGGCUUCAGC
AAGGAGAGCAUCCUGCCCAAGCGGAACAGCGACAAGCUGAUCGCCCGGAAGAAGGACUGG
GACCCCAAGAAGUACGGCGGCUUCGACAGCCCCACCGUGGCCUACAGCGUGCUGGUGGUG
GCCAAGGUGGAGAAGGGCAAGAGCAAGAAGCUGAAAUCCGUGAAGGAGCUGCUGGGCAU
CACCAUCAUGGAGCGGAGCAGCUUCGAGAAGAACCCCAUCGACUUCCUGGAGGCCAAGGG
CUACAAGGAGGUGAAGAAGGACCUGAUCAUCAAGCUGCCCAAGUACAGCCUGUUCGAGCU
GGAGAACGGCCGGAAGCGGAUGCUGGCCAGCGCCGGCGAGCUGCAGAAGGGCAACGAGCU
GGCCCUGCCCAGCAAGUACGUGAACUUCCUGUACCUGGCCAGCCACUACGAGAAGCUGAA
GGGCAGCCCCGAGGACAACGAGCAGAAGCAGCUGUUCGUGGAGCAGCACAAGCACUACCU
GGACGAGAUCAUCGAGCAGAUCAGCGAGUUCAGCAAGCGGGUGAUCCUGGCCGACGCCAA
CCUGGACAAGGUGCUGAGCGCCUACAACAAGCACCGGGACAAGCCCAUCCGGGAGCAGGC
CGAGAACAUCAUCCACCUGUUCACCCUGACCAACCUGGGCGCCCCCGCCGCCUUCAAGUA
CUUCGACACCACCAUCGACCGGAAGCGGUACACCAGCACCAAGGAGGUGCUGGACGCCAC
CCUGAUCCACCAGAGCAUCACCGGCCUGUACGAGACCCGGAUCGACCUGAGCCAGCUGGG
CGGCGACAAGCGGCCCGCCGCCACCAAGAAGGCCGGCCAGGCCAAGAAGAAGAAGGCCCG
GGACAGCAAGGUGGAGAACAAGACCAAGAAGCUGCGGGUGUUCGAGGCCUUCGCCGGCA
UCGGCGCCCAGCGGAAGGCCCUGGAGAAGGUGCGGAAGGACGAGUACGAGAUCGUGGGCC
UGGCCGAGUGGUACGUGCCCGCCAUCGUGAUGUACCAGGCCAUCCACAACAACUUCCACA
CCAAGCUGGAGUACAAGAGCGUGAGCCGGGAGGAGAUGAUCGACUACCUGGAGAACAAG
ACCCUGAGCUGGAACAGCAAGAACCCCGUGAGCAACGGCUACUGGAAGCGGAAGAAGGAC
GACGAGCUGAAGAUCAUCUACAACGCCAUCAAGCUGAGCGAGAAGGAGGGCAACAUCUUC
GACAUCCGGGACCUGUACAAGCGGACCCUGAAGAACAUCGACCUGCUGACCUACAGCUUC
CCCUGCCAGGACCUGAGCCAGCAGGGCAUCCAGAAGGGCAUGAAGCGGGGCAGCGGCACC
CGGAGCGGCCUGCUGUGGGAGAUCGAGCGGGCCCUGGACAGCACCGAGAAGAACGACCUG
CCCAAGUACCUGCUGAUGGAGAACGUGGGCGCCCUGCUGCACAAGAAGAACGAGGAGGAG
CUGAACCAGUGGAAGCAGAAGCUGGAGAGCCUGGGCUACCAGAACAGCAUCGAGGUGCU
GAACGCCGCCGACUUCGGCAGCAGCCAGGCCCGGCGGCGGGUGUUCAUGAUCAGCACCCU
GAACGAGUUCGUGGAGCUGCCCAAGGGCGACAAGAAGCCCAAGAGCAUCAAGAAGGUGC
UGAACAAGAUCGUGAGCGAGAAGGACAUCCUGAACAACCUGCUGAAGUACAACCUGACCG
AGUUCAAGAAAACCAAGAGCAACAUCAACAAGGCCAGCCUGAUCGGCUACAGCAAGUUCA
ACAGCGAGGGCUACGUGUACGACCCCGAGUUCACCGGCCCCACCCUGACCGCCAGCGGCG
CCAACAGCCGGAUCAAGAUCAAGGACGGCAGCAACAUCCGGAAGAUGAACAGCGACGAGA
CCUUCCUGUACAUCGGCUUCGACAGCCAGGACGGCAAGCGGGUGAACGAGAUCGAGUUCC
UGACCGAGAACCAGAAGAUCUUCGUGUGCGGCAACAGCAUCAGCGUGGAGGUGCUGGAG
GCCAUCAUCGACAAGAUCGGCGGCCCCAGCAGCGGCGGCAAGCGGCCCGCCGCCACCAAG
AAGGCCGGCCAGGCCAAGAAGAAGAAGGGCAGCUACCCCUACGACGUGCCCGACUACGCC
UGAGCGGCCGCUUAAUUAAGCUGCCUUCUGCGGGGCUUGCCUUCUGGCCAUGCCCUUCUU
CUCUCCCUUGCACCUGUACCUCUUGGUCUUUGAAUAAAGCCUGAGUAGGAAGUCUAGAAA
AAAAAAAAAAAAAAAAAAAAAAAAAAAAAAAAAAAAAAAAAAAAAAAAAAAAAAAAAA
AAAAAAAAAAAAAAAAAAA

[0209] In some embodiments, a site-specific disrupting agent comprises the amino acid sequence of SEQ ID NOs: 203, 208, 73 or 74. In some embodiments, a site-specific disrupting agent described herein comprises an amino acid sequence of SEQ ID NO: 203, 208, 73 or 74, or a sequence with at least 80, 85, 90, 95, 99, or 100% identity thereto, or having no more than 20, 19, 18, 17, 16, 15, 14, 13, 12, 11, 10, 9, 8, 7, 6, 5, 4, 3, 2, or 1 positions of difference thereto.

Sa-dCas9-MQ1 Protein sequence:
(SEQ ID NO: 203)
MAPKKKRKVGIHGVPAAAKRNYILGLAIGITSVGYGIIDYETRDVIDAGVRLFKEANVENNEGRR
SKRGARRLKRRRRHRIQRVKKLLFDYNLLTDHSELSGINPYEARVKGLSQKLSEEEFSAALLHLA
KRRGVHNVNEVEEDTGNELSTKEQISRNSKALEEKYVAELQLERLKKDGEVRGSINRFKTSDYV
KEAKQLLKVQKAYHQLDQSFIDTYIDLLETRRTYYEGPGEGSPFGWKDIKEWYEMLMGHCTYF
PEELRSVKYAYNADLYNALNDLNNLVITRDENEKLEYYEKFQIIENVFKQKKKPTLKQIAKEILV
NEEDIKGYRVTSTGKPEFTNLKVYHDIKDITARKEIIENAELLDQIAKILTIYQSSEDIQEELTNLNS
ELTQEEIEQISNLKGYTGTHNLSLKAINLILDELWHTNDNQIAIFNRLKLVPKKVDLSQQKEIPTTL
VDDFILSPVVKRSFIQSIKVINAIIKKYGLPNDIIIELAREKNSKDAQKMINEMQKRNRQTNERIEEII
RTTGKENAKYLIEKIKLHDMQEGKCLYSLEAIPLEDLLNNPFNYEVDAIIPRSVSFDNSFNNKVLV
KQEENSKKGNRTPFQYLSSSDSKISYETFKKHILNLAKGKGRISKTKKEYLLEERDINRFSVQKDFI
NRNLVDTRYATRGLMNLLRSYFRVNNLDVKVKSINGGFTSFLRRKWKFKKERNKGYKHHAED
ALIIANADFIFKEWKKLDKAKKVMENQMFEEKQAESMPEIETEQEYKEIFITPHQIKHIKDFKDYK
YSHRVDKKPNRKLINDTLYSTRKDDKGNTLIVNNLNGLYDKDNDKLKKLINKSPEKLLMYHHD
PQTYQKLKLIMEQYGDEKNPLYKYYEETGNYLTKYSKKDNGPVIKKIKYYGNKLNAHLDITDD
YPNSRNKVVKLSLKPYRFDVYLDNGVYKFVTVKNLDVIKKENYYEVNSKCYEEAKKLKKISNQ
AEFIASFYKNDLIKINGELYRVIGVNNDLLNRIEVNMIDITYREYLENMNDKRPPHIIKTIASKTQSI
KKYSTDILGNLYEVKSKKHPQIIKKGKRPAATKKAGQAKKKKARDSKVENKTKKLRVFEAFAGI
GAQRKALEKVRKDEYEIVGLAEWYVPAIVMYQAIHNNFHTKLEYKSVSREEMIDYLENKTLSW
NSKNPVSNGYWKRKKDDELKIIYNAIKLSEKEGNIFDIRDLYKRTLKNIDLLTYSFPCQDLSQQGI
QKGMKRGSGTRSGLLWEIERALDSTEKNDLPKYLLMENVGALLHKKNEEELNQWKQKLESLG
YQNSIEVLNAADFGSSQARRRVFMISTLNEFVELPKGDKKPKSIKKVLNKIVSEKDILNNLLKYNL
TEFKKTKSNINKASLIGYSKFNSEGYVYDPEFTGPTLTASGANSRIKIKDGSNIRKMNSDETFLYIG
FDSQDGKRVNEIEFLTENQKIFVCGNSISVEVLEAIIDKIGGPSSGGKRPAATKKAGQAKKKKGSY
PYDVPDYA
dCas9-MQ1 Protein sequence (corresponding to MR-28125):
(SEQ ID NO: 208)
MAPKKKRKVGIHGVPAADKKYSIGLAIGTNSVGWAVITDEYKVPSKKFKVLGNTDRHSIKKNLI
GALLFDSGETAEATRLKRTARRRYTRRKNRICYLQEIFSNEMAKVDDSFFHRLEESFLVEEDKKH
ERHPIFGNIVDEVAYHEKYPTIYHLRKKLVDSTDKADLRLIYLALAHMIKFRGHFLIEGDLNPDNS
DVDKLFIQLVQTYNQLFEENPINASGVDAKAILSARLSKSRRLENLIAQLPGEKKNGLFGNLIALS
LGLTPNFKSNFDLAEDAKLQLSKDTYDDDLDNLLAQIGDQYADLFLAAKNLSDAILLSDILRVNT
EITKAPLSASMIKRYDEHHQDLTLLKALVRQQLPEKYKEIFFDQSKNGYAGYIDGGASQEEFYKF
IKPILEKMDGTEELLVKLNREDLLRKQRTFDNGSIPHQIHLGELHAILRRQEDFYPFLKDNREKIEK
ILTFRIPYYVGPLARGNSRFAWMTRKSEETITPWNFEEVVDKGASAQSFIERMTNFDKNLPNEKV
LPKHSLLYEYFTVYNELTKVKYVTEGMRKPAFLSGEQKKAIVDLLFKTNRKVTVKQLKEDYFK
KIECFDSVEISGVEDRFNASLGTYHDLLKIIKDKDFLDNEENEDILEDIVLTLTLFEDREMIEERLKT
YAHLFDDKVMKQLKRRRYTGWGRLSRKLINGIRDKQSGKTILDFLKSDGFANRNFMQLIHDDSL
TFKEDIQKAQVSGQGDSLHEHIANLAGSPAIKKGILQTVKVVDELVKVMGRHKPENIVIEMAREN
QTTQKGQKNSRERMKRIEEGIKELGSQILKEHPVENTQLQNEKLYLYYLQNGRDMYVDQELDIN
RLSDYDVAAIVPQSFLKDDSIDNKVLTRSDKARGKSDNVPSEEVVKKMKNYWRQLLNAKLITQ
RKFDNLTKAERGGLSELDKAGFIKRQLVETRQITKHVAQILDSRMNTKYDENDKLIREVKVITLK
SKLVSDFRKDFQFYKVREINNYHHAHDAYLNAVVGTALIKKYPKLESEFVYGDYKVYDVRKMI
AKSEQEIGKATAKYFFYSNIMNFFKTEITLANGEIRKRPLIETNGETGEIVWDKGRDFATVRKVLS
MPQVNIVKKTEVQTGGFSKESILPKRNSDKLIARKKDWDPKKYGGFDSPTVAYSVLVVAKVEKG
KSKKLKSVKELLGITIMERSSFEKNPIDFLEAKGYKEVKKDLIIKLPKYSLFELENGRKRMLASAG
ELQKGNELALPSKYVNFLYLASHYEKLKGSPEDNEQKQLFVEQHKHYLDEIIEQISEFSKRVILAD
ANLDKVLSAYNKHRDKPIREQAENIIHLFTLTNLGAPAAFKYFDTTIDRKRYTSTKEVLDATLIHQ
SITGLYETRIDLSQLGGDKRPAATKKAGQAKKKKARDSKVENKTKKLRVFEAFAGIGAQRKALE
KVRKDEYEIVGLAEWYVPAIVMYQAIHNNFHTKLEYKSVSREEMIDYLENKTLSWNSKNPVSN
GYWKRKKDDELKIIYNAIKLSEKEGNIFDIRDLYKRTLKNIDLLTYSFPCQDLSQQGIQKGMKRG
SGTRSGLLWEIERALDSTEKNDLPKYLLMENVGALLHKKNEEELNQWKQKLESLGYQNSIEVLN
AADFGSSQARRRVFMISTLNEFVELPKGDKKPKSIKKVLNKIVSEKDILNNLLKYNLTEFKKTKS
NINKASLIGYSKFNSEGYVYDPEFTGPTLTASGANSRIKIKDGSNIRKMNSDETFLYIGFDSQDGK
RVNEIEFLTENQKIFVCGNSISVEVLEAIIDKIGGPSSGGKRPAATKKAGQAKKKKGSYPYDVPDY
A
Sa-dCas9-MQ1 without HA tag
(SEQ ID NO: 73)
MAPKKKRKVGIHGVPAAAKRNYILGLAIGITSVGYGIIDYETRDVIDAGVRLFKEANVENNEGRR
SKRGARRLKRRRRHRIQRVKKLLFDYNLLTDHSELSGINPYEARVKGLSQKLSEEEFSAALLHLA
KRRGVHNVNEVEEDTGNELSTKEQISRNSKALEEKYVAELQLERLKKDGEVRGSINRFKTSDYV
KEAKQLLKVQKAYHQLDQSFIDTYIDLLETRRTYYEGPGEGSPFGWKDIKEWYEMLMGHCTYF
PEELRSVKYAYNADLYNALNDLNNLVITRDENEKLEYYEKFQIIENVFKQKKKPTLKQIAKEILV
NEEDIKGYRVTSTGKPEFTNLKVYHDIKDITARKEIIENAELLDQIAKILTIYQSSEDIQEELTNLNS
ELTQEEIEQISNLKGYTGTHNLSLKAINLILDELWHTNDNQIAIFNRLKLVPKKVDLSQQKEIPTTL
VDDFILSPVVKRSFIQSIKVINAIIKKYGLPNDIIIELAREKNSKDAQKMINEMQKRNRQTNERIEEII
RTTGKENAKYLIEKIKLHDMQEGKCLYSLEAIPLEDLLNNPFNYEVDAIIPRSVSFDNSFNNKVLV
KQEENSKKGNRTPFQYLSSSDSKISYETFKKHILNLAKGKGRISKTKKEYLLEERDINRFSVQKDFI
NRNLVDTRYATRGLMNLLRSYFRVNNLDVKVKSINGGFTSFLRRKWKFKKERNKGYKHHAED
ALIIANADFIFKEWKKLDKAKKVMENQMFEEKQAESMPEIETEQEYKEIFITPHQIKHIKDFKDYK
YSHRVDKKPNRKLINDTLYSTRKDDKGNTLIVNNLNGLYDKDNDKLKKLINKSPEKLLMYHHD
PQTYQKLKLIMEQYGDEKNPLYKYYEETGNYLTKYSKKDNGPVIKKIKYYGNKLNAHLDITDD
YPNSRNKVVKLSLKPYRFDVYLDNGVYKFVTVKNLDVIKKENYYEVNSKCYEEAKKLKKISNQ
AEFIASFYKNDLIKINGELYRVIGVNNDLLNRIEVNMIDITYREYLENMNDKRPPHIIKTIASKTQSI
KKYSTDILGNLYEVKSKKHPQIIKKGKRPAATKKAGQAKKKKARDSKVENKTKKLRVFEAFAGI
GAQRKALEKVRKDEYEIVGLAEWYVPAIVMYQAIHNNFHTKLEYKSVSREEMIDYLENKTLSW
NSKNPVSNGYWKRKKDDELKIIYNAIKLSEKEGNIFDIRDLYKRTLKNIDLLTYSFPCQDLSQQGI
QKGMKRGSGTRSGLLWEIERALDSTEKNDLPKYLLMENVGALLHKKNEEELNQWKQKLESLG
YQNSIEVLNAADFGSSQARRRVFMISTLNEFVELPKGDKKPKSIKKVLNKIVSEKDILNNLLKYNL
TEFKKTKSNINKASLIGYSKFNSEGYVYDPEFTGPTLTASGANSRIKIKDGSNIRKMNSDETFLYIG
FDSQDGKRVNEIEFLTENQKIFVCGNSISVEVLEAIIDKIGGPSSGGKRPAATKKAGQAKKKKGS
dCas9-MQ1 without HA tag
(SEQ ID NO: 74)
MAPKKKRKVGIHGVPAADKKYSIGLAIGTNSVGWAVITDEYKVPSKKFKVLGNTDRHSIKKNLI
GALLFDSGETAEATRLKRTARRRYTRRKNRICYLQEIFSNEMAKVDDSFFHRLEESFLVEEDKKH
ERHPIFGNIVDEVAYHEKYPTIYHLRKKLVDSTDKADLRLIYLALAHMIKFRGHFLIEGDLNPDNS
DVDKLFIQLVQTYNQLFEENPINASGVDAKAILSARLSKSRRLENLIAQLPGEKKNGLFGNLIALS
LGLTPNFKSNFDLAEDAKLQLSKDTYDDDLDNLLAQIGDQYADLFLAAKNLSDAILLSDILRVNT
EITKAPLSASMIKRYDEHHQDLTLLKALVRQQLPEKYKEIFFDQSKNGYAGYIDGGASQEEFYKF
IKPILEKMDGTEELLVKLNREDLLRKQRTFDNGSIPHQIHLGELHAILRRQEDFYPFLKDNREKIEK
ILTFRIPYYVGPLARGNSRFAWMTRKSEETITPWNFEEVVDKGASAQSFIERMTNFDKNLPNEKV
LPKHSLLYEYFTVYNELTKVKYVTEGMRKPAFLSGEQKKAIVDLLFKTNRKVTVKQLKEDYFK
KIECFDSVEISGVEDRFNASLGTYHDLLKIIKDKDFLDNEENEDILEDIVLTLTLFEDREMIEERLKT
YAHLFDDKVMKQLKRRRYTGWGRLSRKLINGIRDKQSGKTILDFLKSDGFANRNFMQLIHDDSL
TFKEDIQKAQVSGQGDSLHEHIANLAGSPAIKKGILQTVKVVDELVKVMGRHKPENIVIEMAREN
QTTQKGQKNSRERMKRIEEGIKELGSQILKEHPVENTQLQNEKLYLYYLQNGRDMYVDQELDIN
RLSDYDVAAIVPQSFLKDDSIDNKVLTRSDKARGKSDNVPSEEVVKKMKNYWRQLLNAKLITQ
RKFDNLTKAERGGLSELDKAGFIKRQLVETRQITKHVAQILDSRMNTKYDENDKLIREVKVITLK
SKLVSDFRKDFQFYKVREINNYHHAHDAYLNAVVGTALIKKYPKLESEFVYGDYKVYDVRKMI
AKSEQEIGKATAKYFFYSNIMNFFKTEITLANGEIRKRPLIETNGETGEIVWDKGRDFATVRKVLS
MPQVNIVKKTEVQTGGFSKESILPKRNSDKLIARKKDWDPKKYGGFDSPTVAYSVLVVAKVEKG
KSKKLKSVKELLGITIMERSSFEKNPIDFLEAKGYKEVKKDLIIKLPKYSLFELENGRKRMLASAG
ELQKGNELALPSKYVNFLYLASHYEKLKGSPEDNEQKQLFVEQHKHYLDEIIEQISEFSKRVILAD
ANLDKVLSAYNKHRDKPIREQAENIIHLFTLTNLGAPAAFKYFDTTIDRKRYTSTKEVLDATLIHQ
SITGLYETRIDLSQLGGDKRPAATKKAGQAKKKKARDSKVENKTKKLRVFEAFAGIGAQRKALE
KVRKDEYEIVGLAEWYVPAIVMYQAIHNNFHTKLEYKSVSREEMIDYLENKTLSWNSKNPVSN
GYWKRKKDDELKIIYNAIKLSEKEGNIFDIRDLYKRTLKNIDLLTYSFPCQDLSQQGIQKGMKRG
SGTRSGLLWEIERALDSTEKNDLPKYLLMENVGALLHKKNEEELNQWKQKLESLGYQNSIEVLN
AADFGSSQARRRVFMISTLNEFVELPKGDKKPKSIKKVLNKIVSEKDILNNLLKYNLTEFKKTKS
NINKASLIGYSKFNSEGYVYDPEFTGPTLTASGANSRIKIKDGSNIRKMNSDETFLYIGFDSQDGK
RVNEIEFLTENQKIFVCGNSISVEVLEAIIDKIGGPSSGGKRPAATKKAGQAKKKKGS

[0210] In some embodiments, a site-specific disrupting agent comprises a targeting moiety (e.g., comprising dCas9, e.g., an S. pyogenes dCas9), and an effector moiety comprising KRAB, e.g., a KRAB domain. In some embodiments, the site-specific disrupting agent is encoded by the nucleic acid sequence of SEQ ID NOs: 204 (e.g., a plasmid encoding the site-specific disrupting agent) and/or 205 (e.g., a nucleic acid (e.g., mRNA) encoding the site-specific disrupting agent). In some embodiments, a nucleic acid described herein comprises a nucleic acid sequence of SEQ ID NO: 204 or 205 or a sequence with at least 80, 85, 90, 95, 99, or 100% identity thereto, or having no more than 20, 19, 18, 17, 16, 15, 14, 13, 12, 11, 10, 9, 8, 7, 6, 5, 4, 3, 2, or 1 positions of difference thereto. In some embodiments, the targeting moiety is encoded by the nucleic acid sequence of SEQ ID NO. 8 and the effector moiety is encoded by the nucleic acid sequence of SEQ ID NO. 14.

Sp-dCas9-KRAB (PL-27687) Plasmid DNA sequence:
(SEQ ID NO: 204)
TCGCGCGTTTCGGTGATGACGGTGAAAACCTCTGACACATGCAGCTCCCGGAGACGGTCACA
GCTTGTCTGTAAGCGGATGCCGGGAGCAGACAAGCCCGTCAGGGCGCGTCAGCGGGTGTTG
GCGGGTGTCGGGGCTGGCTTAACTATGCGGCATCAGAGCAGATTGTACTGAGAGTGCACCAT
ATGCGGTGTGAAATACCGCACAGATGCGTAAGGAGAAAATACCGCATCAGGCGCCATTCGC
CATTCAGGCTGCGCAACTGTTGGGAAGGGCGATCGGTGCGGGCCTCTTCGCTATTACGCCAG
CTGGCGAAAGGGGGATGTGCTGCAAGGCGATTAAGTTGGGTAACGCCAGGGTTTTCCCAGT
CACGACGTTGTAAAACGACGGCCAGTGAATTGACGCGTATTGGGATGGTACCTAATACGACT
CACTATAAGGAAATAAGAGAGAAAAGAAGAGTAAGAAGAAATATAAGAGCCACCATGGCC
CCCAAGAAGAAGCGGAAGGTGGGCATCCACGGCGTGCCCGCCGCCGACAAGAAGTACAGC
ATCGGCCTGGCCATCGGCACCAACAGCGTGGGCTGGGCCGTGATCACCGACGAGTACAAGG
TGCCCAGCAAGAAGTTCAAGGTGCTGGGCAACACCGACCGGCACAGCATCAAGAAGAACCT
GATCGGCGCCCTGCTGTTCGACAGCGGCGAGACCGCCGAGGCCACCCGGCTGAAGCGGACC
GCCCGGCGGCGGTACACCCGGCGGAAGAACCGGATCTGCTACCTGCAGGAGATCTTCAGCA
ACGAGATGGCCAAGGTGGACGACAGCTTCTTCCACCGGCTGGAGGAGAGCTTCCTGGTGGA
GGAGGACAAGAAGCACGAGCGGCACCCCATCTTCGGCAACATCGTGGACGAGGTGGCCTAC
CACGAGAAGTACCCCACCATCTACCACCTGCGGAAGAAGCTGGTGGACAGCACCGACAAGG
CCGACCTGCGGCTGATCTACCTGGCCCTGGCCCACATGATCAAGTTCCGGGGCCACTTCCTG
ATCGAGGGCGACCTGAACCCCGACAACAGCGACGTGGACAAGCTGTTCATCCAGCTGGTGC
AGACCTACAACCAGCTGTTCGAGGAGAACCCCATCAACGCCAGCGGCGTGGACGCCAAGGC
CATCCTGAGCGCCCGGCTGAGCAAGAGCCGGCGGCTGGAGAACCTGATCGCCCAGCTGCCC
GGCGAGAAGAAGAACGGCCTGTTCGGCAACCTGATCGCCCTGAGCCTGGGCCTGACCCCCA
ACTTCAAGAGCAACTTCGACCTGGCCGAGGACGCCAAGCTGCAGCTGAGCAAGGACACCTA
CGACGACGACCTGGACAACCTGCTGGCCCAGATCGGCGACCAGTACGCCGACCTGTTCCTGG
CCGCCAAGAACCTGAGCGACGCCATCCTGCTGAGCGACATCCTGCGGGTGAACACCGAGAT
CACCAAGGCCCCCCTGAGCGCCAGCATGATCAAGCGGTACGACGAGCACCACCAGGACCTG
ACCCTGCTGAAGGCCCTGGTGCGGCAGCAGCTGCCCGAGAAGTACAAGGAGATCTTCTTCG
ACCAGAGCAAGAACGGCTACGCCGGCTACATCGACGGCGGCGCCAGCCAGGAGGAGTTCTA
CAAGTTCATCAAGCCCATCCTGGAGAAGATGGACGGCACCGAGGAGCTGCTGGTGAAGCTG
AACCGGGAGGACCTGCTGCGGAAGCAGCGGACCTTCGACAACGGCAGCATCCCCCACCAGA
TCCACCTGGGCGAGCTGCACGCCATCCTGCGGCGGCAGGAGGACTTCTACCCCTTCCTGAAG
GACAACCGGGAGAAGATCGAGAAGATCCTGACCTTCCGGATCCCCTACTACGTGGGCCCCCT
GGCCCGGGGCAACAGCCGGTTCGCCTGGATGACCCGGaaatccGAGGAGACCATCACCCCCTG
GAACTTCGAGGAGGTGGTGGACAAGGGCGCCAGCGCCCAGAGCTTCATCGAGCGGATGACC
AACTTCGACAAGAACCTGCCCAACGAGAAGGTGCTGCCCAAGCACAGCCTGCTGTACGAGT
ACTTCACCGTGTACAACGAGCTGACCAAGGTGAAGTACGTGACCGAGGGCATGCGGAAGCC
CGCCTTCCTGAGCGGCGAGCAGAAGAAGGCCATCGTGGACCTGCTGTTCAAGACCAACCGG
AAGGTGACCGTGAAGCAGCTGAAGGAGGACTACTTCAAGAAGATCGAGTGCTTCGACAGCG
TGGAGATCAGCGGCGTGGAGGACCGGTTCAACGCCAGCCTGGGCACCTACCACGACCTGCT
GAAGATCATCAAGGACAAGGACTTCCTGGACAACGAGGAGAACGAGGACATCCTGGAGGA
CATCGTGCTGACCCTGACCCTGTTCGAGGACCGGGAGATGATCGAGGAGCGGCTGAAaACCT
ACGCCCACCTGTTCGACGACAAGGTGATGAAGCAGCTGAAGCGGCGGCGGTACACCGGCTG
GGGCCGGCTGAGCCGGAAGCTGATCAACGGCATCCGGGACAAGCAGAGCGGCAAGACCATC
CTGGACTTCCTGaaatccGACGGCTTCGCCAACCGGAACTTCATGCAGCTGATCCACGACGACA
GCCTGACCTTCAAGGAGGACATCCAGAAGGCCCAGGTGAGCGGCCAGGGCGACAGCCTGCA
CGAGCACATCGCCAACCTGGCCGGCAGCCCCGCCATCAAGAAGGGCATCCTGCAGACCGTG
AAGGTGGTGGACGAGCTGGTGAAGGTGATGGGCCGGCACAAGCCCGAGAACATCGTGATCG
AGATGGCCCGGGAGAACCAGACCACCCAGAAGGGCCAGAAGAACAGCCGGGAGCGGATGA
AGCGGATCGAGGAGGGCATCAAGGAGCTGGGCAGCCAGATCCTGAAGGAGCACCCCGTGG
AGAACACCCAGCTGCAGAACGAGAAGCTGTACCTGTACTACCTGCAGAACGGCCGGGACAT
GTACGTGGACCAGGAGCTGGACATCAACCGGCTGAGCGACTACGACGTGGCCGCCATCGTG
CCCCAGAGCTTCCTGAAGGACGACAGCATCGACAACAAGGTGCTGACCCGGAGCGACAAGG
CCCGGGGCAAGAGCGACAACGTGCCCAGCGAGGAGGTGGTGAAGAAGATGAAGAACTACT
GGCGGCAGCTGCTGAACGCCAAGCTGATCACCCAGCGGAAGTTCGACAACCTGACCAAGGC
CGAGCGGGGCGGCCTGAGCGAGCTGGACAAGGCCGGCTTCATCAAGCGGCAGCTGGTGGAG
ACCCGGCAGATCACCAAGCACGTGGCCCAGATCCTGGACAGCCGGATGAACACCAAGTACG
ACGAGAACGACAAGCTGATCCGGGAGGTGAAGGTGATCACCCTGaaatccAAGCTGGTGAGCG
ACTTCCGGAAGGACTTCCAGTTCTACAAGGTGCGGGAGATCAACAACTACCACCACGCCCAC
GACGCCTACCTGAACGCCGTGGTGGGCACCGCCCTGATCAAGAAGTACCCCAAGCTGGAGA
GCGAGTTCGTGTACGGCGACTACAAGGTGTACGACGTGCGGAAGATGATCGCCAAGAGCGA
GCAGGAGATCGGCAAGGCCACCGCCAAGTACTTCTTCTACAGCAACATCATGAACTTCTTCA
AGACCGAGATCACCCTGGCCAACGGCGAGATCCGGAAGCGGCCCCTGATCGAGACCAACGG
CGAGACCGGCGAGATCGTGTGGGACAAGGGCCGGGACTTCGCCACCGTGCGGAAGGTGCTG
AGCATGCCCCAGGTGAACATCGTGAAGAAaACCGAGGTGCAGACCGGCGGCTTCAGCAAGG
AGAGCATCCTGCCCAAGCGGAACAGCGACAAGCTGATCGCCCGGAAGAAGGACTGGGACCC
CAAGAAGTACGGCGGCTTCGACAGCCCCACCGTGGCCTACAGCGTGCTGGTGGTGGCCAAG
GTGGAGAAGGGCAAGAGCAAGAAGCTGaaatccGTGAAGGAGCTGCTGGGCATCACCATCATG
GAGCGGAGCAGCTTCGAGAAGAACCCCATCGACTTCCTGGAGGCCAAGGGCTACAAGGAGG
TGAAGAAGGACCTGATCATCAAGCTGCCCAAGTACAGCCTGTTCGAGCTGGAGAACGGCCG
GAAGCGGATGCTGGCCAGCGCCGGCGAGCTGCAGAAGGGCAACGAGCTGGCCCTGCCCAGC
AAGTACGTGAACTTCCTGTACCTGGCCAGCCACTACGAGAAGCTGAAGGGCAGCCCCGAGG
ACAACGAGCAGAAGCAGCTGTTCGTGGAGCAGCACAAGCACTACCTGGACGAGATCATCGA
GCAGATCAGCGAGTTCAGCAAGCGGGTGATCCTGGCCGACGCCAACCTGGACAAGGTGCTG
AGCGCCTACAACAAGCACCGGGACAAGCCCATCCGGGAGCAGGCCGAGAACATCATCCACC
TGTTCACCCTGACCAACCTGGGCGCCCCCGCCGCCTTCAAGTACTTCGACACCACCATCGAC
CGGAAGCGGTACACCAGCACCAAGGAGGTGCTGGACGCCACCCTGATCCACCAGAGCATCA
CCGGCCTGTACGAGACCCGGATCGACCTGAGCCAGCTGGGCGGCGACAAGCGGCCCGCCGC
CACCAAGAAGGCCGGCCAGGCCAAGAAGAAGAAGGCCAGCGACGCCAAGAGCCTGACCGC
CTGGAGCCGGACCCTGGTGACCTTCAAGGACGTGTTCGTGGACTTCACCCGGGAGGAGTGG
AAGCTGCTGGACACCGCCCAGCAGATCCTGTACCGGAACGTGATGCTGGAGAACTACAAGA
ACCTGGTGAGCCTGGGCTACCAGCTGACCAAGCCCGACGTGATCCTGCGGCTGGAGAAGGG
CGAGGAGCCCTGGCTGGTGGAGCGGGAGATCCACCAGGAGACCCACCCCGACAGCGAGACC
GCCTTCGAGATCAAGAGCAGCGTGAGCGGCGGCAAGCGGCCCGCCGCCACCAAGAAGGCCG
GCCAGGCCAAGAAGAAGAAGGGCAGCTACCCCTACGACGTGCCCGACTACGCCTGAGcggccgctta
attaagetgccttctgcggggcttgccttctggccatgcccttcttctctcccttgcacctgtacctc
ttggtctttgaataaagcctgagtaggaagtctagaaaaaaaaaaaaaaaaaaaaaaaaaaaaaaaaa
aaaaaaaaaaaaaaaaaaaaaaaaaaaaaaaaaaaaaaaaaaaaaaattgtcttcttcatcgcc
tgcagATCCCAATGGCGCGCCGAGCTTGGCTCGAGCATGGTCATAGCTGTTTCCTGTGTGAAAT
TGTTATCCGCTCACAATTCCACACAACATACGAGCCGGAAGCATAAAGTGTAAAGCCTGGG
GTGCCTAATGAGTGAGCTAACTCACATTAATTGCGTTGCGCTCACTGCCCGCTTTCCAGTCGG
GAAACCTGTCGTGCCAGCTGCATTAATGAATCGGCCAACGCGCGGGGAGAGGCGGTTTGCG
TATTGGGCGCTCTTCCGCTTCCTCGCTCACTGACTCGCTGCGCTCGGTCGTTCGGCTGCGGCG
AGCGGTATCAGCTCACTCAAAGGCGGTAATACGGTTATCCACAGAATCAGGGGATAACGCA
GGAAAGAACATGTGAGCAAAAGGCCAGCAAAAGGCCAGGAACCGTAAAAAGGCCGCGTTG
CTGGCGTTTTTCCATAGGCTCCGCCCCCCTGACGAGCATCACAAAAATCGACGCTCAAGTCA
GAGGTGGCGAAACCCGACAGGACTATAAAGATACCAGGCGTTTCCCCCTGGAAGCTCCCTC
GTGCGCTCTCCTGTTCCGACCCTGCCGCTTACCGGATACCTGTCCGCCTTTCTCCCTTCGGGA
AGCGTGGCGCTTTCTCATAGCTCACGCTGTAGGTATCTCAGTTCGGTGTAGGTCGTTCGCTCC
AAGCTGGGCTGTGTGCACGAACCCCCCGTTCAGCCCGACCGCTGCGCCTTATCCGGTAACTA
TCGTCTTGAGTCCAACCCGGTAAGACACGACTTATCGCCACTGGCAGCAGCCACTGGTAACA
GGATTAGCAGAGCGAGGTATGTAGGCGGTGCTACAGAGTTCTTGAAGTGGTGGCCTAACTA
CGGCTACACTAGAAGAACAGTATTTGGTATCTGCGCTCTGCTGAAGCCAGTTACCTTCGGAA
AAAGAGTTGGTAGCTCTTGATCCGGCAAACAAACCACCGCTGGTAGCGGTGGTTTTTTTGTT
TGCAAGCAGCAGATTACGCGCAGAAAAAAAGGATCTCAAGAAGATCCTTTGATCTTTTCTAC
GGGGTCTGACGCTCAGTGGAACGAAAACTCACGTTAAGGGATTTTGGTCATGAGATTATCAA
AAAGGATCTTCACCTAGATCCTTTTAAATTAAAAATGAAGTTTTAAATCAATCTAAAGTATA
TATGAGTAAACTTGGTCTGACAGTTAGAAAAACTCATCGAGCATCAAATGAAACTGCAATTT
ATTCATATCAGGATTATCAATACCATATTTTTGAAAAAGCCGTTTCTGTAATGAAGGAGAAA
ACTCACCGAGGCAGTTCCATAGGATGGCAAGATCCTGGTATCGGTCTGCGATTCCGACTCGT
CCAACATCAATACAACCTATTAATTTCCCCTCGTCAAAAATAAGGTTATCAAGTGAGAAATC
ACCATGAGTGACGACTGAATCCGGTGAGAATGGCAAAAGTTTATGCATTTCTTTCCAGACTT
GTTCAACAGGCCAGCCATTACGCTCGTCATCAAAATCACTCGCATCAACCAAACCGTTATTC
ATTCGTGATTGCGCCTGAGCGAGACGAAATACGCGATCGCTGTTAAAAGGACAATTACAAA
CAGGAATCGAATGCAACCGGCGCAGGAACACTGCCAGCGCATCAACAATATTTTCACCTGA
ATCAGGATATTCTTCTAATACCTGGAATGCTGTTTTCCCAGGGATCGCAGTGGTGAGTAACC
ATGCATCATCAGGAGTACGGATAAAATGCTTGATGGTCGGAAGAGGCATAAATTCCGTCAG
CCAGTTTAGTCTGACCATCTCATCTGTAACATCATTGGCAACGCTACCTTTGCCATGTTTCAG
AAACAACTCTGGCGCATCGGGCTTCCCATACAATCGATAGATTGTCGCACCTGATTGCCCGA
CATTATCGCGAGCCCATTTATACCCATATAAATCAGCATCCATGTTGGAATTTAATCGCGGC
CTAGAGCAAGACGTTTCCCGTTGAATATGGCTCATACTCTTCCTTTTTCAATATTATTGAAGC
ATTTATCAGGGTTATTGTCTCATGAGCGGATACATATTTGAATGTATTTAGAAAAATAAACA
AATAGGGGTTCCGCGCACATTTCCCCGAAAAGTGCCACCTGACGTCTAAGAAACCATTATTA
TCATGACATTAACCTATAAAAATAGGCGTATCACGAGGCCCTTTCGTC
Sp-dCas9-KRAB (MR-28122) Expressed mRNA sequence:
(SEQ ID NO: 205)
AGGAAATAAGAGAGAAAAGAAGAGTAAGAAGAAATATAAGAGCCACCATGGCCCCCAAGA
AGAAGCGGAAGGTGGGCATCCACGGCGTGCCCGCCGCCGACAAGAAGTACAGCATCGGCCT
GGCCATCGGCACCAACAGCGTGGGCTGGGCCGTGATCACCGACGAGTACAAGGTGCCCAGC
AAGAAGTTCAAGGTGCTGGGCAACACCGACCGGCACAGCATCAAGAAGAACCTGATCGGCG
CCCTGCTGTTCGACAGCGGCGAGACCGCCGAGGCCACCCGGCTGAAGCGGACCGCCCGGCG
GCGGTACACCCGGCGGAAGAACCGGATCTGCTACCTGCAGGAGATCTTCAGCAACGAGATG
GCCAAGGTGGACGACAGCTTCTTCCACCGGCTGGAGGAGAGCTTCCTGGTGGAGGAGGACA
AGAAGCACGAGCGGCACCCCATCTTCGGCAACATCGTGGACGAGGTGGCCTACCACGAGAA
GTACCCCACCATCTACCACCTGCGGAAGAAGCTGGTGGACAGCACCGACAAGGCCGACCTG
CGGCTGATCTACCTGGCCCTGGCCCACATGATCAAGTTCCGGGGCCACTTCCTGATCGAGGG
CGACCTGAACCCCGACAACAGCGACGTGGACAAGCTGTTCATCCAGCTGGTGCAGACCTAC
AACCAGCTGTTCGAGGAGAACCCCATCAACGCCAGCGGCGTGGACGCCAAGGCCATCCTGA
GCGCCCGGCTGAGCAAGAGCCGGCGGCTGGAGAACCTGATCGCCCAGCTGCCCGGCGAGAA
GAAGAACGGCCTGTTCGGCAACCTGATCGCCCTGAGCCTGGGCCTGACCCCCAACTTCAAGA
GCAACTTCGACCTGGCCGAGGACGCCAAGCTGCAGCTGAGCAAGGACACCTACGACGACGA
CCTGGACAACCTGCTGGCCCAGATCGGCGACCAGTACGCCGACCTGTTCCTGGCCGCCAAGA
ACCTGAGCGACGCCATCCTGCTGAGCGACATCCTGCGGGTGAACACCGAGATCACCAAGGC
CCCCCTGAGCGCCAGCATGATCAAGCGGTACGACGAGCACCACCAGGACCTGACCCTGCTG
AAGGCCCTGGTGCGGCAGCAGCTGCCCGAGAAGTACAAGGAGATCTTCTTCGACCAGAGCA
AGAACGGCTACGCCGGCTACATCGACGGCGGCGCCAGCCAGGAGGAGTTCTACAAGTTCAT
CAAGCCCATCCTGGAGAAGATGGACGGCACCGAGGAGCTGCTGGTGAAGCTGAACCGGGAG
GACCTGCTGCGGAAGCAGCGGACCTTCGACAACGGCAGCATCCCCCACCAGATCCACCTGG
GCGAGCTGCACGCCATCCTGCGGCGGCAGGAGGACTTCTACCCCTTCCTGAAGGACAACCG
GGAGAAGATCGAGAAGATCCTGACCTTCCGGATCCCCTACTACGTGGGCCCCCTGGCCCGGG
GCAACAGCCGGTTCGCCTGGATGACCCGGaaatccGAGGAGACCATCACCCCCTGGAACTTCGA
GGAGGTGGTGGACAAGGGCGCCAGCGCCCAGAGCTTCATCGAGCGGATGACCAACTTCGAC
AAGAACCTGCCCAACGAGAAGGTGCTGCCCAAGCACAGCCTGCTGTACGAGTACTTCACCG
TGTACAACGAGCTGACCAAGGTGAAGTACGTGACCGAGGGCATGCGGAAGCCCGCCTTCCT
GAGCGGCGAGCAGAAGAAGGCCATCGTGGACCTGCTGTTCAAGACCAACCGGAAGGTGACC
GTGAAGCAGCTGAAGGAGGACTACTTCAAGAAGATCGAGTGCTTCGACAGCGTGGAGATCA
GCGGCGTGGAGGACCGGTTCAACGCCAGCCTGGGCACCTACCACGACCTGCTGAAGATCAT
CAAGGACAAGGACTTCCTGGACAACGAGGAGAACGAGGACATCCTGGAGGACATCGTGCTG
ACCCTGACCCTGTTCGAGGACCGGGAGATGATCGAGGAGCGGCTGAAaACCTACGCCCACCT
GTTCGACGACAAGGTGATGAAGCAGCTGAAGCGGCGGCGGTACACCGGCTGGGGCCGGCTG
AGCCGGAAGCTGATCAACGGCATCCGGGACAAGCAGAGCGGCAAGACCATCCTGGACTTCC
TGaaatccGACGGCTTCGCCAACCGGAACTTCATGCAGCTGATCCACGACGACAGCCTGACCTT
CAAGGAGGACATCCAGAAGGCCCAGGTGAGCGGCCAGGGCGACAGCCTGCACGAGCACAT
CGCCAACCTGGCCGGCAGCCCCGCCATCAAGAAGGGCATCCTGCAGACCGTGAAGGTGGTG
GACGAGCTGGTGAAGGTGATGGGCCGGCACAAGCCCGAGAACATCGTGATCGAGATGGCCC
GGGAGAACCAGACCACCCAGAAGGGCCAGAAGAACAGCCGGGAGCGGATGAAGCGGATCG
AGGAGGGCATCAAGGAGCTGGGCAGCCAGATCCTGAAGGAGCACCCCGTGGAGAACACCC
AGCTGCAGAACGAGAAGCTGTACCTGTACTACCTGCAGAACGGCCGGGACATGTACGTGGA
CCAGGAGCTGGACATCAACCGGCTGAGCGACTACGACGTGGCCGCCATCGTGCCCCAGAGC
TTCCTGAAGGACGACAGCATCGACAACAAGGTGCTGACCCGGAGCGACAAGGCCCGGGGCA
AGAGCGACAACGTGCCCAGCGAGGAGGTGGTGAAGAAGATGAAGAACTACTGGCGGCAGC
TGCTGAACGCCAAGCTGATCACCCAGCGGAAGTTCGACAACCTGACCAAGGCCGAGCGGGG
CGGCCTGAGCGAGCTGGACAAGGCCGGCTTCATCAAGCGGCAGCTGGTGGAGACCCGGCAG
ATCACCAAGCACGTGGCCCAGATCCTGGACAGCCGGATGAACACCAAGTACGACGAGAACG
ACAAGCTGATCCGGGAGGTGAAGGTGATCACCCTGaaatccAAGCTGGTGAGCGACTTCCGGA
AGGACTTCCAGTTCTACAAGGTGCGGGAGATCAACAACTACCACCACGCCCACGACGCCTA
CCTGAACGCCGTGGTGGGCACCGCCCTGATCAAGAAGTACCCCAAGCTGGAGAGCGAGTTC
GTGTACGGCGACTACAAGGTGTACGACGTGCGGAAGATGATCGCCAAGAGCGAGCAGGAGA
TCGGCAAGGCCACCGCCAAGTACTTCTTCTACAGCAACATCATGAACTTCTTCAAGACCGAG
ATCACCCTGGCCAACGGCGAGATCCGGAAGCGGCCCCTGATCGAGACCAACGGCGAGACCG
GCGAGATCGTGTGGGACAAGGGCCGGGACTTCGCCACCGTGCGGAAGGTGCTGAGCATGCC
CCAGGTGAACATCGTGAAGAAaACCGAGGTGCAGACCGGCGGCTTCAGCAAGGAGAGCATC
CTGCCCAAGCGGAACAGCGACAAGCTGATCGCCCGGAAGAAGGACTGGGACCCCAAGAAGT
ACGGCGGCTTCGACAGCCCCACCGTGGCCTACAGCGTGCTGGTGGTGGCCAAGGTGGAGAA
GGGCAAGAGCAAGAAGCTGaaatccGTGAAGGAGCTGCTGGGCATCACCATCATGGAGCGGAG
CAGCTTCGAGAAGAACCCCATCGACTTCCTGGAGGCCAAGGGCTACAAGGAGGTGAAGAAG
GACCTGATCATCAAGCTGCCCAAGTACAGCCTGTTCGAGCTGGAGAACGGCCGGAAGCGGA
TGCTGGCCAGCGCCGGCGAGCTGCAGAAGGGCAACGAGCTGGCCCTGCCCAGCAAGTACGT
GAACTTCCTGTACCTGGCCAGCCACTACGAGAAGCTGAAGGGCAGCCCCGAGGACAACGAG
CAGAAGCAGCTGTTCGTGGAGCAGCACAAGCACTACCTGGACGAGATCATCGAGCAGATCA
GCGAGTTCAGCAAGCGGGTGATCCTGGCCGACGCCAACCTGGACAAGGTGCTGAGCGCCTA
CAACAAGCACCGGGACAAGCCCATCCGGGAGCAGGCCGAGAACATCATCCACCTGTTCACC
CTGACCAACCTGGGCGCCCCCGCCGCCTTCAAGTACTTCGACACCACCATCGACCGGAAGCG
GTACACCAGCACCAAGGAGGTGCTGGACGCCACCCTGATCCACCAGAGCATCACCGGCCTG
TACGAGACCCGGATCGACCTGAGCCAGCTGGGCGGCGACAAGCGGCCCGCCGCCACCAAGA
AGGCCGGCCAGGCCAAGAAGAAGAAGGCCAGCGACGCCAAGAGCCTGACCGCCTGGAGCC
GGACCCTGGTGACCTTCAAGGACGTGTTCGTGGACTTCACCCGGGAGGAGTGGAAGCTGCTG
GACACCGCCCAGCAGATCCTGTACCGGAACGTGATGCTGGAGAACTACAAGAACCTGGTGA
GCCTGGGCTACCAGCTGACCAAGCCCGACGTGATCCTGCGGCTGGAGAAGGGCGAGGAGCC
CTGGCTGGTGGAGCGGGAGATCCACCAGGAGACCCACCCCGACAGCGAGACCGCCTTCGAG
ATCAAGAGCAGCGTGAGCGGCGGCAAGCGGCCCGCCGCCACCAAGAAGGCCGGCCAGGCC
AAGAAGAAGAAGGGCAGCTACCCCTACGACGTGCCCGACTACGCCTGAGcggccgcttaatta
agctgccttctgcggggcttgccttctggccatgcccttcttctctcccttgcacctgtacct
cttggtctttgaataaagcctgagtaggaagtctagaaaaaaaaaaaaaaaaaaaaaaaaaaa
aaaaaaaaaaaaaaaaaaaaaaaaaaaaaaaaaaaaaaaaaaaaaaaaaaaaa

In some embodiments, a site-specific disrupting agent comprises the amino acid sequence of SEQ ID NOs: 206 or 75. In some embodiments, a nucleic acid described herein comprises a nucleic acid sequence of SEQ ID NO: 206 or 75 or a sequence with at least 80, 85, 90, 95, 99, or 100% identity thereto, or having no more than 20, 19, 18, 17, 16, 15, 14, 13, 12, 11, 10, 9, 8, 7, 6, 5, 4, 3, 2, or 1 positions of difference thereto.

Sp-dCas9-KRAB Protein sequence:
(SEQ ID NO: 206)
MAPKKKRKVGIHGVPAADKKYSIGLAIGTNSVGWAVITDEYKVPSKKFKVLGNTDRHSIKKNLI
GALLFDSGETAEATRLKRTARRRYTRRKNRICYLQEIFSNEMAKVDDSFFHRLEESFLVEEDKKE
ERHPIFGNIVDEVAYHEKYPTIYHLRKKLVDSTDKADLRLIYLALAHMIKFRGHFLIEGDLNPDNS
DVDKLFIQLVQTYNQLFEENPINASGVDAKAILSARLSKSRRLENLIAQLPGEKKNGLFGNLIALS
LGLTPNFKSNFDLAEDAKLQLSKDTYDDDLDNLLAQIGDQYADLFLAAKNLSDAILLSDILRVN]
EITKAPLSASMIKRYDEHHQDLTLLKALVRQQLPEKYKEIFFDQSKNGYAGYIDGGASQEEFYKF
IKPILEKMDGTEELLVKLNREDLLRKQRTFDNGSIPHQIHLGELHAILRRQEDFYPFLKDNREKIEF
ILTFRIPYYVGPLARGNSRFAWMTRKSEETITPWNFEEVVDKGASAQSFIERMTNFDKNLPNEKV
LPKHSLLYEYFTVYNELTKVKYVTEGMRKPAFLSGEQKKAIVDLLFKTNRKVTVKQLKEDYFK
KIECFDSVEISGVEDRFNASLGTYHDLLKIIKDKDFLDNEENEDILEDIVLTLTLFEDREMIEERLK:
YAHLFDDKVMKQLKRRRYTGWGRLSRKLINGIRDKQSGKTILDFLKSDGFANRNFMQLIHDDSI
TFKEDIQKAQVSGQGDSLHEHIANLAGSPAIKKGILQTVKVVDELVKVMGRHKPENIVIEMAREN
QTTQKGQKNSRERMKRIEEGIKELGSQILKEHPVENTQLQNEKLYLYYLQNGRDMYVDQELDIN
RLSDYDVAAIVPQSFLKDDSIDNKVLTRSDKARGKSDNVPSEEVVKKMKNYWRQLLNAKLITQ
RKFDNLTKAERGGLSELDKAGFIKRQLVETRQITKHVAQILDSRMNTKYDENDKLIREVKVITLK
SKLVSDFRKDFQFYKVREINNYHHAHDAYLNAVVGTALIKKYPKLESEFVYGDYKVYDVRKMI
AKSEQEIGKATAKYFFYSNIMNFFKTEITLANGEIRKRPLIETNGETGEIVWDKGRDFATVRKVLS
MPQVNIVKKTEVQTGGFSKESILPKRNSDKLIARKKDWDPKKYGGFDSPTVAYSVLVVAKVEKG
KSKKLKSVKELLGITIMERSSFEKNPIDFLEAKGYKEVKKDLIIKLPKYSLFELENGRKRMLASAG
ELQKGNELALPSKYVNFLYLASHYEKLKGSPEDNEQKQLFVEQHKHYLDEIIEQISEFSKRVILAD
ANLDKVLSAYNKHRDKPIREQAENIIHLFTLTNLGAPAAFKYFDTTIDRKRYTSTKEVLDATLIHQ
SITGLYETRIDLSQLGGDKRPAATKKAGQAKKKKASDAKSLTAWSRTLVTFKDVFVDFTREEWK
LLDTAQQILYRNVMLENYKNLVSLGYQLTKPDVILRLEKGEEPWLVEREIHQETHPDSETAFEIK
SSVSGGKRPAATKKAGQAKKKKGSYPYDVPDYA
Sp-dCas9-KRAB Protein sequence without HA tag:
(SEQ ID NO: 75)
MAPKKKRKVGIHGVPAADKKYSIGLAIGTNSVGWAVITDEYKVPSKKFKVLGNTDRHSIKKNLI
GALLFDSGETAEATRLKRTARRRYTRRKNRICYLQEIFSNEMAKVDDSFFHRLEESFLVEEDKKH
ERHPIFGNIVDEVAYHEKYPTIYHLRKKLVDSTDKADLRLIYLALAHMIKFRGHFLIEGDLNPDNS
DVDKLFIQLVQTYNQLFEENPINASGVDAKAILSARLSKSRRLENLIAQLPGEKKNGLFGNLIALS
LGLTPNFKSNFDLAEDAKLQLSKDTYDDDLDNLLAQIGDQYADLFLAAKNLSDAILLSDILRVNT
EITKAPLSASMIKRYDEHHQDLTLLKALVRQQLPEKYKEIFFDQSKNGYAGYIDGGASQEEFYKF
IKPILEKMDGTEELLVKLNREDLLRKQRTFDNGSIPHQIHLGELHAILRRQEDFYPFLKDNREKIEK
ILTFRIPYYVGPLARGNSRFAWMTRKSEETITPWNFEEVVDKGASAQSFIERMTNFDKNLPNEKV
LPKHSLLYEYFTVYNELTKVKYVTEGMRKPAFLSGEQKKAIVDLLFKTNRKVTVKQLKEDYFK
KIECFDSVEISGVEDRFNASLGTYHDLLKIIKDKDFLDNEENEDILEDIVLTLTLFEDREMIEERLKT
YAHLFDDKVMKQLKRRRYTGWGRLSRKLINGIRDKQSGKTILDFLKSDGFANRNFMQLIHDDSL
TFKEDIQKAQVSGQGDSLHEHIANLAGSPAIKKGILQTVKVVDELVKVMGRHKPENIVIEMAREN
QTTQKGQKNSRERMKRIEEGIKELGSQILKEHPVENTQLQNEKLYLYYLQNGRDMYVDQELDIN
RLSDYDVAAIVPQSFLKDDSIDNKVLTRSDKARGKSDNVPSEEVVKKMKNYWRQLLNAKLITQ
RKFDNLTKAERGGLSELDKAGFIKRQLVETRQITKHVAQILDSRMNTKYDENDKLIREVKVITLK
SKLVSDFRKDFQFYKVREINNYHHAHDAYLNAVVGTALIKKYPKLESEFVYGDYKVYDVRKMI
AKSEQEIGKATAKYFFYSNIMNFFKTEITLANGEIRKRPLIETNGETGEIVWDKGRDFATVRKVLS
MPQVNIVKKTEVQTGGFSKESILPKRNSDKLIARKKDWDPKKYGGFDSPTVAYSVLVVAKVEKG
KSKKLKSVKELLGITIMERSSFEKNPIDFLEAKGYKEVKKDLIIKLPKYSLFELENGRKRMLASAG
ELQKGNELALPSKYVNFLYLASHYEKLKGSPEDNEQKQLFVEQHKHYLDEIIEQISEFSKRVILAD
ANLDKVLSAYNKHRDKPIREQAENIIHLFTLTNLGAPAAFKYFDTTIDRKRYTSTKEVLDATLIHQ
SITGLYETRIDLSQLGGDKRPAATKKAGQAKKKKASDAKSLTAWSRTLVTFKDVFVDFTREEWK
LLDTAQQILYRNVMLENYKNLVSLGYQLTKPDVILRLEKGEEPWLVEREIHQETHPDSETAFEIK
SSVSGGKRPAATKKAGQAKKKKGS

[0211] In some embodiments, a site-specific disrupting agent comprises a targeting moiety (e.g., comprising dCas9, e.g., an S. aureus dCas9) and an effector moiety comprising EZH2. In some embodiments, a site-specific disrupting agent comprises a targeting moiety comprising dCas9, e.g., an S. pyogenes dCas9, e.g., mutant S. pyogenes Cas9, e.g., Cas9m4 and an effector moiety comprising EZH2. In some embodiments, the site-specific disrupting agent is encoded by the nucleic acid sequence of SEQ ID NO: 209 (e.g., mRNA encoding the site-specific disrupting agent). In some embodiments, a nucleic acid described herein comprises a nucleic acid sequence of SEQ ID NO: 209 or a sequence with at least 80, 85, 90, 95, 99, or 100% identity thereto, or having no more than 20, 19, 18, 17, 16, 15, 14, 13, 12, 11, 10, 9, 8, 7, 6, 5, 4, 3, 2, or 1 positions of difference thereto. In some embodiments, the targeting moiety is encoded by the nucleic acid sequence of SEQ ID NO: 8 and/or the effector moiety is encoded by the nucleic acid sequence of SEQ ID NO: 18.

EZH2-dCas9 mRNA (MR28938)
(SEQ ID NO: 209)
AGGAAAUAAGAGAGAAAAGAAGAGUAAGAAGAAAUAUAAGAGCCACCAUGGCCCCCAAG
AAGAAGCGGAAGGUGGGCGGCAGCGGCGGCAGCGGCCAGACCGGCAAGAAGAGCGAGAA
GGGCCCCGUGUGCUGGCGGAAGCGGGUGAAGAGCGAGUACAUGCGGCUGCGGCAGCUGA
AGCGGUUCCGGCGGGCCGACGAGGUGAAGAGCAUGUUCAGCAGCAACCGGCAGAAGAUCC
UGGAGCGGACCGAGAUCCUGAACCAGGAGUGGAAGCAGCGGCGAAUCCAGCCCGUGCACA
UCCUGACCAGCGUGAGCAGCCUGCGGGGCACCCGGGAGUGCAGCGUGACCAGCGACCUGG
ACUUCCCCACCCAGGUGAUCCCCCUAAAGACCCUGAACGCCGUGGCCAGCGUGCCCAUCA
UGUACAGCUGGAGCCCCCUGCAGCAGAACUUCAUGGUGGAGGACGAGACCGUGCUGCACA
ACAUCCCCUACAUGGGCGACGAGGUGCUGGACCAGGACGGCACCUUCAUCGAGGAGCUGA
UCAAGAACUACGACGGCAAGGUGCACGGCGACCGGGAGUGCGGCUUCAUCAACGACGAGA
UCUUCGUGGAGCUGGUGAACGCCCUGGGCCAGUACAACGACGACGACGACGACGACGACG
GCGACGACCCCGAGGAGCGGGAGGAGAAGCAGAAGGACCUGGAGGACCACCGGGACGACA
AGGAGAGCCGGCCCCCCCGGAAGUUCCCCAGCGACAAGAUCUUCGAGGCCAUCAGCAGCA
UGUUCCCCGACAAGGGCACCGCCGAGGAGCUGAAGGAGAAGUACAAGGAGCUGACCGAGC
AGCAGCUGCCCGGCGCCCUGCCCCCCGAGUGCACCCCCAACAUCGACGGCCCCAACGCCAA
GAGCGUGCAGCGGGAGCAGAGCCUGCACAGCUUCCACACCCUGUUCUGCCGGCGGUGCUU
CAAGUACGACUGCUUCCUGCACCCCUUCCACGCCACCCCCAACACCUACAAGCGGAAGAA
CACCGAGACCGCCCUGGACAACAAGCCCUGCGGCCCCCAGUGCUACCAGCACCUGGAGGG
CGCCAAGGAGUUCGCCGCCGCCCUGACCGCCGAGCGGAUCAAGACCCCCCCCAAGCGGCCC
GGCGGCCGGCGGCGGGGCCGGCUGCCCAACAACAGCAGCCGGCCCAGCACCCCCACCAUCA
ACGUGCUGGAGAGCAAGGACACCGACAGCGACCGGGAGGCCGGCACCGAGACCGGCGGCG
AGAACAACGACAAGGAGGAGGAGGAGAAGAAGGACGAGACCAGCAGCAGCAGCGAGGCC
AACAGCCGGUGCCAGACCCCCAUCAAGAUGAAGCCCAACAUCGAGCCCCCCGAGAACGUG
GAGUGGAGCGGCGCCGAGGCCAGCAUGUUCCGGGUGCUGAUCGGCACCUACUACGACAAC
UUCUGCGCCAUCGCCCGGCUGAUCGGCACCAAGACCUGCCGGCAGGUGUACGAGUUCCGG
GUGAAGGAGAGCAGCAUCAUCGCCCCCGCCCCCGCCGAGGACGUGGACACCCCCCCCCGG
AAGAAGAAGCGGAAGCACCGGCUGUGGGCCGCCCACUGCCGGAAGAUCCAGCUGAAGAAG
GACGGCAGCAGCAACCACGUGUACAACUACCAGCCCUGCGACCACCCCCGGCAGCCCUGC
GACAGCAGCUGCCCCUGCGUGAUCGCCCAGAACUUCUGCGAGAAGUUCUGCCAGUGCAGC
AGCGAGUGCCAGAACCGGUUCCCCGGCUGCCGGUGCAAGGCCCAGUGCAACACCAAGCAG
UGCCCCUGCUACCUGGCCGUGCGGGAGUGCGACCCCGACCUGUGCCUGACCUGCGGCGCC
GCCGACCACUGGGACAGCAAGAACGUGAGCUGCAAGAACUGCAGCAUCCAGCGGGGCAGC
AAGAAGCACCUGCUGCUGGCCCCCAGCGACGUGGCCGGCUGGGGCAUCUUCAUCAAGGAC
CCCGUGCAGAAGAACGAGUUCAUCAGCGAGUACUGCGGCGAGAUCAUCAGCCAGGACGAG
GCCGACCGGCGGGGCAAGGUGUACGACAAGUACAUGUGCAGCUUCCUGUUCAACCUGAAC
AACGACUUCGUGGUGGACGCCACCCGGAAGGGCAACAAGAUCCGGUUCGCCAACCACAGC
GUGAACCCCAACUGCUACGCCAAGGUGAUGAUGGUGAACGGCGACCACCGGAUCGGCAUC
UUCGCCAAGCGGGCCAUCCAGACCGGCGAGGAGCUGUUCUUCGACUACCGGUACAGCCAG
GCCGACGCCCUGAAGUACGUGGGCAUCGAGCGGGAGAUGGAGAUCCCCAGCACCGGCGGC
AGCGGCGGCAGCGGCGGCAGCGGCGGCAGCGGCGGCAGCGGCCGACCCGACAAGAAGUAC
AGCAUCGGCCUGGCCAUCGGCACCAACAGCGUGGGCUGGGCCGUGAUCACCGACGAGUAC
AAGGUGCCCAGCAAGAAGUUCAAGGUGCUGGGCAACACCGACCGGCACAGCAUCAAGAAG
AACCUGAUCGGCGCCCUGCUGUUCGACAGCGGCGAGACCGCCGAGGCCACCCGGCUGAAG
CGGACCGCCCGGCGGCGGUACACCCGGCGGAAGAACCGGAUCUGCUACCUGCAGGAGAUC
UUCAGCAACGAGAUGGCCAAGGUGGACGACAGCUUCUUCCACCGGCUGGAGGAGAGCUUC
CUGGUGGAGGAGGACAAGAAGCACGAGCGGCACCCCAUCUUCGGCAACAUCGUGGACGAG
GUGGCCUACCACGAGAAGUACCCCACCAUCUACCACCUGCGGAAGAAGCUGGUGGACAGC
ACCGACAAGGCCGACCUGCGGCUGAUCUACCUGGCCCUGGCCCACAUGAUCAAGUUCCGG
GGCCACUUCCUGAUCGAGGGCGACCUGAACCCCGACAACAGCGACGUGGACAAGCUGUUC
AUCCAGCUGGUGCAGACCUACAACCAGCUGUUCGAGGAGAACCCCAUCAACGCCAGCGGC
GUGGACGCCAAGGCCAUCCUGAGCGCCCGGCUGAGCAAGAGCCGGCGGCUGGAGAACCUG
AUCGCCCAGCUGCCCGGCGAGAAGAAGAACGGCCUGUUCGGCAACCUGAUCGCCCUGAGC
CUGGGCCUGACCCCCAACUUCAAGAGCAACUUCGACCUGGCCGAGGACGCCAAGCUGCAG
CUGAGCAAGGACACCUACGACGACGACCUGGACAACCUGCUGGCCCAGAUCGGCGACCAG
UACGCCGACCUGUUCCUGGCCGCCAAGAACCUGAGCGACGCCAUCCUGCUGAGCGACAUC
CUGCGGGUGAACACCGAGAUCACCAAGGCCCCCCUGAGCGCCAGCAUGAUCAAGCGGUAC
GACGAGCACCACCAGGACCUGACCCUGCUGAAGGCCCUGGUGCGGCAGCAGCUGCCCGAG
AAGUACAAGGAGAUCUUCUUCGACCAGAGCAAGAACGGCUACGCCGGCUACAUCGACGGC
GGCGCCAGCCAGGAGGAGUUCUACAAGUUCAUCAAGCCCAUCCUGGAGAAGAUGGACGGC
ACCGAGGAGCUGCUGGUGAAGCUGAACCGGGAGGACCUGCUGCGGAAGCAGCGGACCUUC
GACAACGGCAGCAUCCCCCACCAGAUCCACCUGGGCGAGCUGCACGCCAUCCUGCGGCGG
CAGGAGGACUUCUACCCCUUCCUGAAGGACAACCGGGAGAAGAUCGAGAAGAUCCUGACC
UUCCGGAUCCCCUACUACGUGGGCCCCCUGGCCCGGGGCAACAGCCGGUUCGCCUGGAUG
ACCCGGAAAUCCGAGGAGACCAUCACCCCCUGGAACUUCGAGGAGGUGGUGGACAAGGGC
GCCAGCGCCCAGAGCUUCAUCGAGCGGAUGACCAACUUCGACAAGAACCUGCCCAACGAG
AAGGUGCUGCCCAAGCACAGCCUGCUGUACGAGUACUUCACCGUGUACAACGAGCUGACC
AAGGUGAAGUACGUGACCGAGGGCAUGCGGAAGCCCGCCUUCCUGAGCGGCGAGCAGAAG
AAGGCCAUCGUGGACCUGCUGUUCAAGACCAACCGGAAGGUGACCGUGAAGCAGCUGAAG
GAGGACUACUUCAAGAAGAUCGAGUGCUUCGACAGCGUGGAGAUCAGCGGCGUGGAGGA
CCGGUUCAACGCCAGCCUGGGCACCUACCACGACCUGCUGAAGAUCAUCAAGGACAAGGA
CUUCCUGGACAACGAGGAGAACGAGGACAUCCUGGAGGACAUCGUGCUGACCCUGACCCU
GUUCGAGGACCGGGAGAUGAUCGAGGAGCGGCUGAAAACCUACGCCCACCUGUUCGACGA
CAAGGUGAUGAAGCAGCUGAAGCGGCGGCGGUACACCGGCUGGGGCCGGCUGAGCCGGAA
GCUGAUCAACGGCAUCCGGGACAAGCAGAGCGGCAAGACCAUCCUGGACUUCCUGAAAUC
CGACGGCUUCGCCAACCGGAACUUCAUGCAGCUGAUCCACGACGACAGCCUGACCUUCAA
GGAGGACAUCCAGAAGGCCCAGGUGAGCGGCCAGGGCGACAGCCUGCACGAGCACAUCGC
CAACCUGGCCGGCAGCCCCGCCAUCAAGAAGGGCAUCCUGCAGACCGUGAAGGUGGUGGA
CGAGCUGGUGAAGGUGAUGGGCCGGCACAAGCCCGAGAACAUCGUGAUCGAGAUGGCCCG
GGAGAACCAGACCACCCAGAAGGGCCAGAAGAACAGCCGGGAGCGGAUGAAGCGGAUCGA
GGAGGGCAUCAAGGAGCUGGGCAGCCAGAUCCUGAAGGAGCACCCCGUGGAGAACACCCA
GCUGCAGAACGAGAAGCUGUACCUGUACUACCUGCAGAACGGCCGGGACAUGUACGUGGA
CCAGGAGCUGGACAUCAACCGGCUGAGCGACUACGACGUGGCCGCCAUCGUGCCCCAGAG
CUUCCUGAAGGACGACAGCAUCGACAACAAGGUGCUGACCCGGAGCGACAAGGCCCGGGG
CAAGAGCGACAACGUGCCCAGCGAGGAGGUGGUGAAGAAGAUGAAGAACUACUGGCGGC
AGCUGCUGAACGCCAAGCUGAUCACCCAGCGGAAGUUCGACAACCUGACCAAGGCCGAGC
GGGGCGGCCUGAGCGAGCUGGACAAGGCCGGCUUCAUCAAGCGGCAGCUGGUGGAGACCC
GGCAGAUCACCAAGCACGUGGCCCAGAUCCUGGACAGCCGGAUGAACACCAAGUACGACG
AGAACGACAAGCUGAUCCGGGAGGUGAAGGUGAUCACCCUGAAAUCCAAGCUGGUGAGC
GACUUCCGGAAGGACUUCCAGUUCUACAAGGUGCGGGAGAUCAACAACUACCACCACGCC
CACGACGCCUACCUGAACGCCGUGGUGGGCACCGCCCUGAUCAAGAAGUACCCCAAGCUG
GAGAGCGAGUUCGUGUACGGCGACUACAAGGUGUACGACGUGCGGAAGAUGAUCGCCAA
GAGCGAGCAGGAGAUCGGCAAGGCCACCGCCAAGUACUUCUUCUACAGCAACAUCAUGAA
CUUCUUCAAGACCGAGAUCACCCUGGCCAACGGCGAGAUCCGGAAGCGGCCCCUGAUCGA
GACCAACGGCGAGACCGGCGAGAUCGUGUGGGACAAGGGCCGGGACUUCGCCACCGUGCG
GAAGGUGCUGAGCAUGCCCCAGGUGAACAUCGUGAAGAAAACCGAGGUGCAGACCGGCG
GCUUCAGCAAGGAGAGCAUCCUGCCCAAGCGGAACAGCGACAAGCUGAUCGCCCGGAAGA
AGGACUGGGACCCCAAGAAGUACGGCGGCUUCGACAGCCCCACCGUGGCCUACAGCGUGC
UGGUGGUGGCCAAGGUGGAGAAGGGCAAGAGCAAGAAGCUGAAAUCCGUGAAGGAGCUG
CUGGGCAUCACCAUCAUGGAGCGGAGCAGCUUCGAGAAGAACCCCAUCGACUUCCUGGAG
GCCAAGGGCUACAAGGAGGUGAAGAAGGACCUGAUCAUCAAGCUGCCCAAGUACAGCCUG
UUCGAGCUGGAGAACGGCCGGAAGCGGAUGCUGGCCAGCGCCGGCGAGCUGCAGAAGGGC
AACGAGCUGGCCCUGCCCAGCAAGUACGUGAACUUCCUGUACCUGGCCAGCCACUACGAG
AAGCUGAAGGGCAGCCCCGAGGACAACGAGCAGAAGCAGCUGUUCGUGGAGCAGCACAAG
CACUACCUGGACGAGAUCAUCGAGCAGAUCAGCGAGUUCAGCAAGCGGGUGAUCCUGGCC
GACGCCAACCUGGACAAGGUGCUGAGCGCCUACAACAAGCACCGGGACAAGCCCAUCCGG
GAGCAGGCCGAGAACAUCAUCCACCUGUUCACCCUGACCAACCUGGGCGCCCCCGCCGCC
UUCAAGUACUUCGACACCACCAUCGACCGGAAGCGGUACACCAGCACCAAGGAGGUGCUG
GACGCCACCCUGAUCCACCAGAGCAUCACCGGCCUGUACGAGACCCGGAUCGACCUGAGC
CAGCUGGGCGGCGACAGCGGCGGCAAGCGGCCCGCCGCCACCAAGAAGGCCGGCCAGGCC
AAGAAGAAGAAGGGCAGCUACCCCUACGACGUGCCCGACUACGCCUGAGCGGCCGCUUAA
UUAAGCUGCCUUCUGCGGGGCUUGCCUUCUGGCCAUGCCCUUCUUCUCUCCCUUGCACCU
GUACCUCUUGGUCUUUGAAUAAAGCCUGAGUAGGAAGUCUAGAAAAAAAAAAAAAAAAA
AAAAAAAAAAAAAAAAAAAAAAAAAAAAAAAAAAAAAAAAAAAAAAAAAAAAAAAAAA
AAAAA

[0212] In some embodiments, a site-specific disrupting agent comprises the amino acid sequence of SEQ ID NOs: 210 or 76. In some embodiments, a nucleic acid described herein comprises a nucleic acid sequence of SEQ ID NO: 210 or 76 or a sequence with at least 80, 85, 90, 95, 99, or 100% identity thereto, or having no more than 20, 19, 18, 17, 16, 15, 14, 13, 12, 11, 10, 9, 8, 7, 6, 5, 4, 3, 2, or 1 positions of difference thereto.

EZH2-dCas9 Protein Sequence
(corresponding to MR-28938)
(SEQ ID NO: 210)
MAPKKKRKVGGSGGSGQTGKKSEKGPVCWRKRVKSEYMRLRQLKR
FRRADEVKSMFSSNRQKILERTEILNQEWKQRRIQPVHILTSVSS
LRGTRECSVTSDLDFPTQVIPLKTLNAVASVPIMYSWSPLQQNFM
VEDETVLHNIPYMGDEVLDQDGTFIEELIKNYDGKVHGDRECGFI
NDEIFVELVNALGQYNDDDDDDDGDDPEEREEKQKDLEDHRDDKE
SRPPRKFPSDKIFEAISSMFPDKGTAEELKEKYKELTEQQLPGAL
PPECTPNIDGPNAKSVQREQSLHSFHTLFCRRCFKYDCFLHPFHA
TPNTYKRKNTETALDNKPCGPQCYQHLEGAKEFAAALTAERIKTP
PKRPGGRRRGRLPNNSSRPSTPTINVLESKDTDSDREAGTETGGE
NNDKEEEEKKDETSSSSEANSRCQTPIKMKPNIEPPENVEWSGAE
ASMFRVLIGTYYDNFCAIARLIGTKTCRQVYEFRVKESSIIAPAP
AEDVDTPPRKKKRKHRLWAAHCRKIQLKKDGSSNHVYNYQPCDHP
RQPCDSSCPCVIAQNFCEKFCQCSSECQNRFPGCRCKAQCNTKQC
PCYLAVRECDPDLCLTCGAADHWDSKNVSCKNCSIQRGSKKHLLL
APSDVAGWGIFIKDPVQKNEFISEYCGEIISQDEADRRGKVYDKY
MCSFLFNLNNDFVVDATRKGNKIRFANHSVNPNCYAKVMMVNGDH
RIGIFAKRAIQTGEELFFDYRYSQADALKYVGIEREMEIPSTGGS
GGSGGSGGSGGSGRPDKKYSIGLAIGTNSVGWAVITDEYKVPSKK
FKVLGNTDRHSIKKNLIGALLFDSGETAEATRLKRTARRRYTRRK
NRICYLQEIFSNEMAKVDDSFFHRLEESFLVEEDKKHERHPIFGN
IVDEVAYHEKYPTIYHLRKKLVDSTDKADLRLIYLALAHMIKFRG
HFLIEGDLNPDNSDVDKLFIQLVQTYNQLFEENPINASGVDAKAI
LSARLSKSRRLENLIAQLPGEKKNGLFGNLIALSLGLTPNFKSNF
DLAEDAKLQLSKDTYDDDLDNLLAQIGDQYADLFLAAKNLSDAIL
LSDILRVNTEITKAPLSASMIKRYDEHHQDLTLLKALVRQQLPEK
YKEIFFDQSKNGYAGYIDGGASQEEFYKFIKPILEKMDGTEELLV
KLNREDLLRKQRTFDNGSIPHQIHLGELHAILRRQEDFYPFLKDN
REKIEKILTFRIPYYVGPLARGNSRFAWMTRKSEETITPWNFEEV
VDKGASAQSFIERMTNFDKNLPNEKVLPKHSLLYEYFTVYNELTK
VKYVTEGMRKPAFLSGEQKKAIVDLLFKTNRKVTVKQLKEDYFKK
IECFDSVEISGVEDRFNASLGTYHDLLKIIKDKDFLDNEENEDIL
EDIVLTLTLFEDREMIEERLKTYAHLFDDKVMKQLKRRRYTGWGR
LSRKLINGIRDKQSGKTILDFLKSDGFANRNFMQLIHDDSLTFKE
DIQKAQVSGQGDSLHEHIANLAGSPAIKKGILQTVKVVDELVKVM
GRHKPENIVIEMARENQTTQKGQKNSRERMKRIEEGIKELGSQIL
KEHPVENTQLQNEKLYLYYLQNGRDMYVDQELDINRLSDYDVAAI
VPQSFLKDDSIDNKVLTRSDKARGKSDNVPSEEVVKKMKNYWRQL
LNAKLITQRKFDNLTKAERGGLSELDKAGFIKRQLVETRQITKHV
AQILDSRMNTKYDENDKLIREVKVITLKSKLVSDFRKDFQFYKVR
EINNYHHAHDAYLNAVVGTALIKKYPKLESEFVYGDYKVYDVRKM
IAKSEQEIGKATAKYFFYSNIMNFFKTEITLANGEIRKRPLIETN
GETGEIVWDKGRDFATVRKVLSMPQVNIVKKTEVQTGGFSKESIL
PKRNSDKLIARKKDWDPKKYGGFDSPTVAYSVLVVAKVEKGKSKK
LKSVKELLGITIMERSSFEKNPIDFLEAKGYKEVKKDLIIKLPKY
SLFELENGRKRMLASAGELQKGNELALYNKHRDKPIREQAENIIH
LFTLTNLGAPAAFKYFDTTIDRKRYTSTKEVLDATLIHQSITGLY
ETRIDLSQLGGDSGGKRPAATKKAGQAKKKKGSYPYDVPDYA
EZH2-dCas9 without HA tag
(SEQ ID NO: 76)
MAPKKKRKVGGSGGSGQTGKKSEKGPVCWRKRVKSEYMRLRQLKR
FRRADEVKSMFSSNRQKILERTEILNQEWKQRRIQPVHILTSVSS
LRGTRECSVTSDLDFPTQVIPLKTLNAVASVPIMYSWSPLQQNFM
VEDETVLHNIPYMGDEVLDQDGTFIEELIKNYDGKVHGDRECGFI
NDEIFVELVNALGQYNDDDDDDDGDDPEEREEKQKDLEDHRDDKE
SRPPRKFPSDKIFEAISSMFPDKGTAEELKEKYKELTEQQLPGAL
PPECTPNIDGPNAKSVQREQSLHSFHTLFCRRCFKYDCFLHPFHA
TPNTYKRKNTETALDNKPCGPQCYQHLEGAKEFAAALTAERIKTP
PKRPGGRRRGRLPNNSSRPSTPTINVLESKDTDSDREAGTETGGE
NNDKEEEEKKDETSSSSEANSRCQTPIKMKPNIEPPENVEWSGAE
ASMFRVLIGTYYDNFCAIARLIGTKTCRQVYEFRVKESSIIAPAP
AEDVDTPPRKKKRKHRLWAAHCRKIQLKKDGSSNHVYNYQPCDHP
RQPCDSSCPCVIAQNFCEKFCQCSSECQNRFPGCRCKAQCNTKQC
PCYLAVRECDPDLCLTCGAADHWDSKNVSCKNCSIQRGSKKHLLL
APSDVAGWGIFIKDPVQKNEFISEYCGEIISQDEADRRGKVYDKY
MCSFLFNLNNDFVVDATRKGNKIRFANHSVNPNCYAKVMMVNGDH
RIGIFAKRAIQTGEELFFDYRYSQADALKYVGIEREMEIPSTGGS
GGSGGSGGSGGSGRPDKKYSIGLAIGTNSVGWAVITDEYKVPSKK
FKVLGNTDRHSIKKNLIGALLFDSGETAEATRLKRTARRRYTRRK
NRICYLQEIFSNEMAKVDDSFFHRLEESFLVEEDKKHERHPIFGN
IVDEVAYHEKYPTIYHLRKKLVDSTDKADLRLIYLALAHMIKFRG
HFLIEGDLNPDNSDVDKLFIQLVQTYNQLFEENPINASGVDAKAI
LSARLSKSRRLENLIAQLPGEKKNGLFGNLIALSLGLTPNFKSNF
DLAEDAKLQLSKDTYDDDLDNLLAQIGDQYADLFLAAKNLSDAIL
LSDILRVNTEITKAPLSASMIKRYDEHHQDLTLLKALVRQQLPEK
YKEIFFDQSKNGYAGYIDGGASQEEFYKFIKPILEKMDGTEELLV
KLNREDLLRKQRTFDNGSIPHQIHLGELHAILRRQEDFYPFLKDN
REKIEKILTFRIPYYVGPLARGNSRFAWMTRKSEETITPWNFEEV
VDKGASAQSFIERMTNFDKNLPNEKVLPKHSLLYEYFTVYNELTK
VKYVTEGMRKPAFLSGEQKKAIVDLLFKTNRKVTVKQLKEDYFKK
IECFDSVEISGVEDRFNASLGTYHDLLKIIKDKDFLDNEENEDIL
EDIVLTLTLFEDREMIEERLKTYAHLFDDKVMKQLKRRRYTGWGR
LSRKLINGIRDKQSGKTILDFLKSDGFANRNFMQLIHDDSLTFKE
DIQKAQVSGQGDSLHEHIANLAGSPAIKKGILQTVKVVDELVKVM
GRHKPENIVIEMARENQTTQKGQKNSRERMKRIEEGIKELGSQIL
KEHPVENTQLQNEKLYLYYLQNGRDMYVDQELDINRLSDYDVAAI
VPQSFLKDDSIDNKVLTRSDKARGKSDNVPSEEVVKKMKNYWRQL
LNAKLITQRKFDNLTKAERGGLSELDKAGFIKRQLVETRQITKHV
AQILDSRMNTKYDENDKLIREVKVITLKSKLVSDFRKDFQFYKVR
EINNYHHAHDAYLNAVVGTALIKKYPKLESEFVYGDYKVYDVRKM
IAKSEQEIGKATAKYFFYSNIMNFFKTEITLANGEIRKRPLIETN
GETGEIVWDKG
RDFATVRKVLSMPQVNIVKKTEVQTGGFSKESILPKRNSDKLIAR
KKDWDPKKYGGFDSPTVAYSVLVVAKVEKGKSKKLKSVKELLGIT
IMERSSFEKNPIDFLEAKGYKEVKKDLIIKLPKYSLFELENGRKR
MLASAGELQKGNELALYNKHRDKPIREQAENIIHLFTLTNLGAPA
AFKYFDTTIDRKRYTSTKEVLDATLIHQSITGLYETRIDLSQLGG
DSGGKRPAATKKAGQAKKKKGS

[0213] In some embodiments, a site-specific disrupting agent comprises a targeting moiety (e.g., comprising dCas9, e.g., an S. aureus dCas9), and an effector moiety comprising DNMT3 (e.g., DNMT3a/3L). In some embodiments, a site-specific disrupting agent comprises a targeting moiety comprising dCas9, e.g., an S. pyogenes dCas9, e.g., mutant S. pyogenes Cas9, e.g., Cas9m4 and an effector moiety comprising DNMT3 (e.g., DNMT3a/3L). In some embodiments, the site-specific disrupting agent is encoded by the nucleic acid sequence of SEQ ID NO: 211 (e.g., mRNA encoding the site-specific disrupting agent). In some embodiments, a nucleic acid described herein comprises a nucleic acid sequence of SEQ ID NO: 211 or a sequence with at least 80, 85, 90, 95, 99, or 100% identity thereto, or having no more than 20, 19, 18, 17, 16, 15, 14, 13, 12, 11, 10, 9, 8, 7, 6, 5, 4, 3, 2, or 1 positions of difference thereto.

dCas9-DNMT3a/3L mRNA (MR-29414)
(SEQ ID NO: 211)
AGGAAAUAAGAGAGAAAAGAAGAGUAAGAAGAAAUAUAAGAGCCA
CCAUGGCCCCCAAGAAGAAGCGGAAGGUGGGCAUCCACGGCGUGC
CCGCCGCCGACAAGAAGUACAGCAUCGGCCUGGCCAUCGGCACCA
ACAGCGUGGGCUGGGCCGUGAUCACCGACGAGUACAAGGUGCCCA
GCAAGAAGUUCAAGGUGCUGGGCAACACCGACCGGCACAGCAUCA
AGAAGAACCUGAUCGGCGCCCUGCUGUUCGACAGCGGCGAGACCG
CCGAGGCCACCCGGCUGAAGCGGACCGCCCGGCGGCGGUACACCC
GGCGGAAGAACCGGAUCUGCUACCUGCAGGAGAUCUUCAGCAACG
AGAUGGCCAAGGUGGACGACAGCUUCUUCCACCGGCUGGAGGAGA
GCUUCCUGGUGGAGGAGGACAAGAAGCACGAGCGGCACCCCAUCU
UCGGCAACAUCGUGGACGAGGUGGCCUACCACGAGAAGUACCCCA
CCAUCUACCACCUGCGGAAGAAGCUGGUGGACAGCACCGACAAGG
CCGACCUGCGGCUGAUCUACCUGGCCCUGGCCCACAUGAUCAAGU
UCCGGGGCCACUUCCUGAUCGAGGGCGACCUGAACCCCGACAACA
GCGACGUGGACAAGCUGUUCAUCCAGCUGGUGCAGACCUACAACC
AGCUGUUCGAGGAGAACCCCAUCAACGCCAGCGGCGUGGACGCCA
AGGCCAUCCUGAGCGCCCGGCUGAGCAAGAGCCGGCGGCUGGAGA
ACCUGAUCGCCCAGCUGCCCGGCGAGAAGAAGAACGGCCUGUUCG
GCAACCUGAUCGCCCUGAGCCUGGGCCUGACCCCCAACUUCAAGA
GCAACUUCGACCUGGCCGAGGACGCCAAGCUGCAGCUGAGCAAGG
ACACCUACGACGACGACCUGGACAACCUGCUGGCCCAGAUCGGCG
ACCAGUACGCCGACCUGUUCCUGGCCGCCAAGAACCUGAGCGACG
CCAUCCUGCUGAGCGACAUCCUGCGGGUGAACACCGAGAUCACCA
AGGCCCCCCUGAGCGCCAGCAUGAUCAAGCGGUACGACGAGCACC
ACCAGGACCUGACCCUGCUGAAGGCCCUGGUGCGGCAGCAGCUGC
CCGAGAAGUACAAGGAGAUCUUCUUCGACCAGAGCAAGAACGGCU
ACGCCGGCUACAUCGACGGCGGCGCCAGCCAGGAGGAGUUCUACA
AGUUCAUCAAGCCCAUCCUGGAGAAGAUGGACGGCACCGAGGAGC
UGCUGGUGAAGCUGAACCGGGAGGACCUGCUGCGGAAGCAGCGGA
CCUUCGACAACGGCAGCAUCCCCCACCAGAUCCACCUGGGCGAGC
UGCACGCCAUCCUGCGGCGGCAGGAGGACUUCUACCCCUUCCUGA
AGGACAACCGGGAGAAGAUCGAGAAGAUCCUGACCUUCCGGAUCC
CCUACUACGUGGGCCCCCUGGCCCGGGGCAACAGCCGGUUCGCCU
GGAUGACCCGGAAAUCCGAGGAGACCAUCACCCCCUGGAACUUCG
AGGAGGUGGUGGACAAGGGCGCCAGCGCCCAGAGCUUCAUCGAGC
GGAUGACCAACUUCGACAAGAACCUGCCCAACGAGAAGGUGCUGC
CCAAGCACAGCCUGCUGUACGAGUACUUCACCGUGUACAACGAGC
UGACCAAGGUGAAGUACGUGACCGAGGGCAUGCGGAAGCCCGCCU
UCCUGAGCGGCGAGCAGAAGAAGGCCAUCGUGGACCUGCUGUUCA
AGACCAACCGGAAGGUGACCGUGAAGCAGCUGAAGGAGGACUACU
UCAAGAAGAUCGAGUGCUUCGACAGCGUGGAGAUCAGCGGCGUGG
AGGACCGGUUCAACGCCAGCCUGGGCACCUACCACGACCUGCUGA
AGAUCAUCAAGGACAAGGACUUCCUGGACAACGAGGAGAACGAGG
ACAUCCUGGAGGACAUCGUGCUGACCCUGACCCUGUUCGAGGACC
GGGAGAUGAUCGAGGAGCGGCUGAAAACCUACGCCCACCUGUUCG
ACGACAAGGUGAUGAAGCAGCUGAAGCGGCGGCGGUACACCGGCU
GGGGCCGGCUGAGCCGGAAGCUGAUCAACGGCAUCCGGGACAAGC
AGAGCGGCAAGACCAUCCUGGACUUCCUGAAAUCCGACGGCUUCG
CCAACCGGAACUUCAUGCAGCUGAUCCACGACGACAGCCUGACCU
UCAAGGAGGACAUCCAGAAGGCCCAGGUGAGCGGCCAGGGCGACA
GCCUGCACGAGCACAUCGCCAACCUGGCCGGCAGCCCCGCCAUCA
AGAAGGGCAUCCUGCAGACCGUGAAGGUGGUGGACGAGCUGGUGA
AGGUGAUGGGCCGGCACAAGCCCGAGAACAUCGUGAUCGAGAUGG
CCCGGGAGAACCAGACCACCCAGAAGGGCCAGAAGAACAGCCGGG
AGCGGAUGAAGCGGAUCGAGGAGGGCAUCAAGGAGCUGGGCAGCC
AGAUCCUGAAGGAGCACCCCGUGGAGAACACCCAGCUGCAGAACG
AGAAGCUGUACCUGUACUACCUGCAGAACGGCCGGGACAUGUACG
UGGACCAGGAGCUGGACAUCAACCGGCUGAGCGACUACGACGUGG
CCGCCAUCGUGCCCCAGAGCUUCCUGAAGGACGACAGCAUCGACA
ACAAGGUGCUGACCCGGAGCGACAAGGCCCGGGGCAAGAGCGACA
ACGUGCCCAGCGAGGAGGUGGUGAAGAAGAUGAAGAACUACUGGC
GGCAGCUGCUGAACGCCAAGCUGAUCACCCAGCGGAAGUUCGACA
ACCUGACCAAGGCCGAGCGGGGCGGCCUGAGCGAGCUGGACAAGG
CCGGCUUCAUCAAGCGGCAGCUGGUGGAGACCCGGCAGAUCACCA
AGCACGUGGCCCAGAUCCUGGACAGCCGGAUGAACACCAAGUACG
ACGAGAACGACAAGCUGAUCCGGGAGGUGAAGGUGAUCACCCUGA
AAUCCAAGCUGGUGAGCGACUUCCGGAAGGACUUCCAGUUCUACA
AGGUGCGGGAGAUCAACAACUACCACCACGCCCACGACGCCUACC
UGAACGCCGUGGUGGGCACCGCCCUGAUCAAGAAGUACCCCAAGC
UGGAGAGCGAGUUCGUGUACGGCGACUACAAGGUGUACGACGUGC
GGAAGAUGAUCGCCAAGAGCGAGCAGGAGAUCGGCAAGGCCACCG
CCAAGUACUUCUUCUACAGCAACAUCAUGAACUUCUUCAAGACCG
AGAUCACCCUGGCCAACGGCGAGAUCCGGAAGCGGCCCCUGAUCG
AGACCAACGGCGAGACCGGCGAGAUCGUGUGGGACAAGGGCCGGG
ACUUCGCCACCGUGCGGAAGGUGCUGAGCAUGCCCCAGGUGAACA
UCGUGAAGAAAACCGAGGUGCAGACCGGCGGCUUCAGCAAGGAGA
GCAUCCUGCCCAAGCGGAACAGCGACAAGCUGAUCGCCCGGAAGA
AGGACUGGGACCCCAAGAAGUACGGCGGCUUCGACAGCCCCACCG
UGGCCUACAGCGUGCUGGUGGUGGCCAAGGUGGAGAAGGGCAAGA
GCAAGAAGCUGAAAUCCGUGAAGGAGCUGCUGGGCAUCACCAUCA
UGGAGCGGAGCAGCUUCGAGAAGAACCCCAUCGACUUCCUGGAGG
CCAAGGGCUACAAGGAGGUGAAGAAGGACCUGAUCAUCAAGCUGC
CCAAGUACAGCCUGUUCGAGCUGGAGAACGGCCGGAAGCGGAUGC
UGGCCAGCGCCGGCGAGCUGCAGAAGGGCAACGAGCUGGCCCUGC
CCAGCAAGUACGUGAACUUCCUGUACCUGGCCAGCCACUACGAGA
AGCUGAAGGGCAGCCCCGAGGACAACGAGCAGAAGCAGCUGUUCG
UGGAGCAGCACAAGCACUACCUGGACGAGAUCAUCGAGCAGAUCA
GCGAGUUCAGCAAGCGGGUGAUCCUGGCCGACGCCAACCUGGACA
AGGUGCUGAGCGCCUACAACAAGCACCGGGACAAGCCCAUCCGGG
AGCAGGCCGAGAACAUCAUCCACCUGUUCACCCUGACCAACCUGG
GCGCCCCCGCCGCCUUCAAGUACUUCGACACCACCAUCGACCGGA
AGCGGUACACCAGCACCAAGGAGGUGCUGGACGCCACCCUGAUCC
ACCAGAGCAUCACCGGCCUGUACGAGACCCGGAUCGACCUGAGCC
AGCUGGGCGGCGACAGCGCCGGCGGCGGCGGCAGCGGCGGCGGCG
GCAGCGGCGGCGGCGGCAGCGGCCCCAAGAAGAAGCGGAAGGUGG
CCGCCGCCGGCAGCAACCACGACCAGGAGUUCGACCCCCCCAAGG
UGUACCCCCCCGUGCCCGCCGAGAAGCGGAAGCCCAUCCGGGUGC
UGAGCCUGUUCGACGGCAUCGCCACCGGCCUGCUGGUGCUGAAGG
ACCUGGGCAUCCAGGUGGACCGGUACAUCGCCAGCGAGGUGUGCG
AGGACAGCAUCACCGUGGGCAUGGUGCGGCACCAGGGCAAGAUCA
UGUACGUGGGCGACGUGCGGAGCGUGACCCAGAAGCACAUCCAGG
AGUGGGGCCCCUUCGACCUGGUGAUCGGCGGCAGCCCCUGCAACG
ACCUGAGCAUCGUGAACCCCGCCCGGAAGGGCCUGUACGAGGGCA
CCGGCCGGCUGUUCUUCGAGUUCUACCGGCUGCUGCACGACGCCC
GGCCCAAGGAGGGCGACGACCGGCCCUUCUUCUGGCUGUUCGAGA
ACGUGGUGGCCAUGGGCGUGAGCGACAAGCGGGACAUCAGCCGGU
UCCUGGAGAGCAACCCCGUGAUGAUCGACGCCAAGGAGGUGAGCG
CCGCCCACCGGGCCCGGUACUUCUGGGGCAACCUGCCCGGCAUGA
ACCGGCCCCUGGCCAGCACCGUGAACGACAAGCUGGAGCUGCAGG
AGUGCCUGGAGCACGGCCGGAUCGCCAAGUUCAGCAAGGUGCGGA
CCAUCACCACCCGGAGCAACAGCAUCAAGCAGGGCAAGGACCAGC
ACUUCCCCGUGUUCAUGAACGAGAAGGAGGACAUCCUGUGGUGCA
CCGAGAUGGAGCGGGUGUUCGGCUUCCCCGUGCACUACACCGACG
UGAGCAACAUGAGCCGGCUGGCCCGGCAGCGGCUGCUGGGCCGGA
GCUGGAGCGUGCCCGUGAUCCGGCACCUGUUCGCCCCCCUGAAGG
AGUACUUCGCCUGCGUGAGCAGCGGCAACAGCAACGCCAACAGCC
GGGGCCCCAGCUUCAGCAGCGGCCUGGUGCCCCUGAGCCUGCGGG
GCAGCCACAUGAAUCCUCUGGAGAUGUUCGAGACAGUGCCCGUGU
GGAGAAGGCAACCCGUGAGGGUGCUGAGCCUCUUCGAGGACAUUA
AGAAGGAGCUGACCUCUCUGGGCUUUCUGGAAUCCGGCAGCGACC
CCGGCCAGCUGAAACACGUGGUGGACGUGACCGACACAGUGAGGA
AGGACGUGGAAGAGUGGGGCCCCUUUGACCUCGUGUAUGGAGCCA
CACCUCCUCUCGGCCACACAUGCGAUAGGCCUCCCAGCUGGUAUC
UCUUCCAGUUCCACAGACUGCUCCAGUACGCCAGACCUAAGCCCG
GCAGCCCCAGACCCUUCUUCUGGAUGUUCGUGGACAAUCUGGUGC
UGAACAAGGAGGAUCUGGAUGUGGCCAGCAGAUUUCUGGAGAUGG
AACCCGUGACAAUCCCCGACGUGCAUGGCGGCUCUCUGCAGAACG
CCGUGAGAGUGUGGUCCAACAUCCCCGCCAUUAGAAGCAGACACU
GGGCUCUGGUGAGCGAGGAGGAACUGUCUCUGCUGGCCCAGAAUA
AGCAGUCCUCCAAGCUGGCCGCCAAGUGGCCCACCAAGCUGGUGA
AGAACUGCUUUCUGCCUCUGAGGGAGUAUUUCAAGUAUUUCAGCA
CCGAACUGACCAGCAGCCUGAGCGGCGGCAAGCGGCCCGCCGCCA
CCAAGAAGGCCGGCCAGGCCAAGAAGAAGAAGGGCAGCUACCCCU
ACGACGUGCCCGACUACGCCUGAGCGGCCGCUUAAUUAAGCUGCC
UUCUGCGGGGCUUGCCUUCUGGCCAUGCCCUUCUUCUCUCCCUUG
CACCUGUACCUCUUGGUCUUUGAAUAAAGCCUGAGUAGGAAGUCU
AGAAAAAAAAAAAAAAAAAAAAAAAAAAAAAAAAAAAAAAAAAAA
AAAAAAAAAAAAAAAAAAAAAAAAAAAAAAAAAAAAA

[0214] In some embodiments, a site-specific disrupting agent comprises the amino acid sequence of SEQ ID NOs: 211 or 77. In some embodiments, a construct described herein comprises an amino acid sequence of SEQ ID NO: 211 or 77 or a sequence with at least 80, 85, 90, 95, 99, or 100% identity thereto, or having no more than 20, 19, 18, 17, 16, 15, 14, 13, 12, 11, 10, 9, 8, 7, 6, 5, 4, 3, 2, or 1 positions of difference thereto.

dCas9-DNMT3a/3L Protein Sequence
(corresponding to MR-29414)
(SEQ ID NO: 212)
MAPKKKRKVGIHGVPAADKKYSIGLAIGTNSVGWAVITDEYKVPS
KKFKVLGNTDRHSIKKNLIGALLFDSGETAEATRLKRTARRRYTR
RKNRICYLQEIFSNEMAKVDDSFFHRLEESFLVEEDKKHERHPIF
GNIVDEVAYHEKYPTIYHLRKKLVDSTDKADLRLIYLALAHMIKF
RGHFLIEGDLNPDNSDVDKLFIQLVQTYNQLFEENPINASGVDAK
AILSARLSKSRRLENLIAQLPGEKKNGLFGNLIALSLGLTPNFKS
NFDLAEDAKLQLSKDTYDDDLDNLLAQIGDQYADLFLAAKNLSDA
ILLSDILRVNTEITKAPLSASMIKRYDEHHQDLTLLKALVRQQLP
EKYKEIFFDQSKNGYAGYIDGGASQEEFYKFIKPILEKMDGTEEL
LVKLNREDLLRKQRTFDNGSIPHQIHLGELHAILRRQEDFYPFLK
DNREKIEKILTFRIPYYVGPLARGNSRFAWMTRKSEETITPWNFE
EVVDKGASAQSFIERMTNFDKNLPNEKVLPKHSLLYEYFTVYNEL
TKVKYVTEGMRKPAFLSGEQKKAIVDLLFKTNRKVTVKQLKEDYF
KKIECFDSVEISGVEDRFNASLGTYHDLLKIIKDKDFLDNEENED
ILEDIVLTLTLFEDREMIEERLKTYAHLFDDKVMKQLKRRRYTGW
GRLSRKLINGIRDKQSGKTILDFLKSDGFANRNFMQLIHDDSLTF
KEDIQKAQVSGQGDSLHEHIANLAGSPAIKKGILQTVKVVDELVK
VMGRHKPENIVIEMARENQTTQKGQKNSRERMKRIEEGIKELGSQ
ILKEHPVENTQLQNEKLYLYYLQNGRDMYVDQELDINRLSDYDVA
AIVPQSFLKDDSIDNKVLTRSDKARGKSDNVPSEEVVKKMKNYWR
QLLNAKLITQRKFDNLTKAERGGLSELDKAGFIKRQLVETRQITK
HVAQILDSRMNTKYDENDKLIREVKVITLKSKLVSDFRKDFQFYK
VREINNYHHAHDAYLNAVVGTALIKKYPKLESEFVYGDYKVYDVR
KMIAKSEQEIGKATAKYFFYSNIMNFFKTEITLANGEIRKRPLIE
TNGETGEIVWDKGRDFATVRKVLSMPQVNIVKKTEVQTGGFSKES
ILPKRNSDKLIARKKDWDPKKYGGFDSPTVAYSVLVVAKVEKGKS
KKLKSVKELLGITIMERSSFEKNPIDFLEAKGYKEVKKDLIIKLP
KYSLFELENGRKRMLASAGELQKGNELALPSKYVNFLYLASHYEK
LKGSPEDNEQKQLFVEQHKHYLDEIIEQISEFSKRVILADANLDK
VLSAYNKHRDKPIREQAENIIHLFTLTNLGAPAAFKYFDTTIDRK
RYTSTKEVLDATLIHQSITGLYETRIDLSQLGGDSAGGGGSGGGG
SGGGGSGPKKKRKVAAAGSNHDQEFDPPKVYPPVPAEKRKPIRVL
SLFDGIATGLLVLKDLGIQVDRYIASEVCEDSITVGMVRHQGKIM
YVGDVRSVTQKHIQEWGPFDLVIGGSPCNDLSIVNPARKGLYEGT
GRLFFEFYRLLHDARPKEGDDRPFFWLFENVVAMGVSDKRDISRF
LESNPVMIDAKEVSAAHRARYFWGNLPGMNRPLASTVNDKLELQE
CLEHGRIAKFSKVRTITTRSNSIKQGKDQHFPVFMNEKEDILWCT
EMERVFGFPVHYTDVSNMSRLARQRLLGRSWSVPVIRHLFAPLKE
YFACVSSGNSNANSRGPSFSSGLVPLSLRGSHMNPLEMFETVPVW
RRQPVRVLSLFEDIKKELTSLGFLESGSDPGQLKHVVDVTDTVRK
DVEEWGPFDLVYGATPPLGHTCDRPPSWYLFQFHRLLQYARPKPG
SPRPFFWMFVDNLVLNKEDLDVASRFLEMEPVTIPDVHGGSLQNA
VRVWSNIPAIRSRHWALVSEEELSLLAQNKQSSKLAAKWPTKLVK
NCFLPLREYFKYFSTELTSSLSGGKRPAATKKAGQAKKKKGSYPY
DVPDYA
dCas-DNMT3a/3L (h) without HA tag
(SEQ ID NO: 77)
MAPKKKRKVGIHGVPAADKKYSIGLAIGTNSVGWAVITDEYKVPS
KKFKVLGNTDRHSIKKNLIGALLFDSGETAEATRLKRTARRRYTR
RKNRICYLQEIFSNEMAKVDDSFFHRLEESFLVEEDKKHERHPIF
GNIVDEVAYHEKYPTIYHLRKKLVDSTDKADLRLIYLALAHMIKF
RGHFLIEGDLNPDNSDVDKLFIQLVQTYNQLFEENPINASGVDAK
AILSARLSKSRRLENLIAQLPGEKKNGLFGNLIALSLGLTPNFKS
NFDLAEDAKLQLSKDTYDDDLDNLLAQIGDQYADLFLAAKNLSDA
ILLSDILRVNTEITKAPLSASMIKRYDEHHQDLTLLKALVRQQLP
EKYKEIFFDQSKNGYAGYIDGGASQEEFYKFIKPILEKMDGTEEL
LVKLNREDLLRKQRTFDNGSIPHQIHLGELHAILRRQEDFYPFLK
DNREKIEKILTFRIPYYVGPLARGNSRFAWMTRKSEETITPWNFE
EVVDKGASAQSFIERMTNFDKNLPNEKVLPKHSLLYEYFTVYNEL
TKVKYVTEGMRKPAFLSGEQKKAIVDLLFKTNRKVTVKQLKEDYF
KKIECFDSVEISGVEDRFNASLGTYHDLLKIIKDKDFLDNEENED
ILEDIVLTLTLFEDREMIEERLKTYAHLFDDKVMKQLKRRRYTGW
GRLSRKLINGIRDKQSGKTILDFLKSDGFANRNFMQLIHDDSLTF
KEDIQKAQVSGQGDSLHEHIANLAGSPAIKKGILQTVKVVDELVK
VMGRHKPENIVIEMARENQTTQKGQKNSRERMKRIEEGIKELGSQ
ILKEHPVENTQLQNEKLYLYYLQNGRDMYVDQELDINRLSDYDVA
AIVPQSFLKDDSIDNKVLTRSDKARGKSDNVPSEEVVKKMKNYWR
QLLNAKLITQRKFDNLTKAERGGLSELDKAGFIKRQLVETRQITK
HVAQILDSRMNTKYDENDKLIREVKVITLKSKLVSDFRKDFQFYK
VREINNYHHAHDAYLNAVVGTALIKKYPKLESEFVYGDYKVYDVR
KMIAKSEQEIGKATAKYFFYSNIMNFFKTEITLANGEIRKRPLIE
TNGETGEIVWDKGRDFATVRKVLSMPQVNIVKKTEVQTGGFSKES
ILPKRNSDKLIARKKDWDPKKYGGFDSPTVAYSVLVVAKVEKGKS
KKLKSVKELLGITIMERSSFEKNPIDFLEAKGYKEVKKDLIIKLP
KYSLFELENGRKRMLASAGELQKGNELALPSKYVNFLYLASHYEK
LKGSPEDNEQKQLFVEQHKHYLDEIIEQISEFSKRVILADANLDK
VLSAYNKHRDKPIREQAENIIHLFTLTNLGAPAAFKYFDTTIDRK
RYTSTKEVLDATLIHQSITGLYETRIDLSQLGGDSAGGGGSGGGG
SGGGGSGPKKKRKVAAAGSNHDQEFDPPKVYPPVPAEKRKPIRVL
SLFDGIATGLLVLKDLGIQVDRYIASEVCEDSITVGMVRHQGKIM
YVGDVRSVTQKHIQEWGPFDLVIGGSPCNDLSIVNPARKGLYEGT
GRLFFEFYRLLHDARPKEGDDRPFFWLFENVVAMGVSDKRDISRF
LESNPVMIDAKEVSAAHRARYFWGNLPGMNRPLASTVNDKLELQE
CLEHGRIAKFSKVRTITTRSNSIKQGKDQHFPVFMNEKEDILWCT
EMERVFGFPVHYTDVSNMSRLARQRLLGRSWSVPVIRHLFAPLKE
YFACVSSGNSNANSRGPSFSSGLVPLSLRGSHMNPLEMFETVPVW
RRQPVRVLSLFEDIKKELTSLGFLESGSDPGQLKHVVDVTDTVRK
DVEEWGPFDLVYGATPPLGHTCDRPPSWYLFQFHRLLQYARPKPG
SPRPFFWMFVDNLVLNKEDLDVASRFLEMEPVTIPDVHGGSLQNA
VRVWSNIPAIRSRHWALVSEEELSLLAQNKQSSKLAAKWPTKLVK
NCFLPLREYFKYFSTELTSSLSGGKRPAATKKAGQAKKKKGS

[0215] In some embodiments, a site-specific disrupting agent comprises a targeting moiety (e.g., comprising dCas9, e.g., an S. aureus dCas9), and an effector moiety comprising HDAC8, e.g., a HDAC8 domain. In some embodiments, a site-specific disrupting agent comprises a targeting moiety comprising dCas9, e.g., an S. pyogenes dCas9, e.g., mutant S. pyogenes Cas9, e.g., Cas9m4, and an effector moiety comprising HDAC8, e.g., a HDAC8 domain. In some embodiments, the site-specific disrupting agent is encoded by the nucleic acid sequence of SEQ ID NO: 213 (e.g., mRNA encoding the site-specific disrupting agent).

[0216] In some embodiments, a nucleic acid described herein comprises a nucleic acid sequence of SEQ ID NO: 213 or a sequence with at least 80, 85, 90, 95, 99, or 100% identity thereto, or having no more than 20, 19, 18, 17, 16, 15, 14, 13, 12, 11, 10, 9, 8, 7, 6, 5, 4, 3, 2, or 1 positions of difference thereto.

dCas9-HDAC8 mRNA (MR-29439)
(SEQ ID NO: 213)
AGGAAAUAAGAGAGAAAAGAAGAGUAAGAAGAAAUAUAAGAGCCA
CCAUGGCCCCCAAGAAGAAGCGGAAGGUGGGCAUCCACGGCGUGC
CCGCCGCCGACAAGAAGUACAGCAUCGGCCUGGCCAUCGGCACCA
ACAGCGUGGGCUGGGCCGUGAUCACCGACGAGUACAAGGUGCCCA
GCAAGAAGUUCAAGGUGCUGGGCAACACCGACCGGCACAGCAUCA
AGAAGAACCUGAUCGGCGCCCUGCUGUUCGACAGCGGCGAGACCG
CCGAGGCCACCCGGCUGAAGCGGACCGCCCGGCGGCGGUACACCC
GGCGGAAGAACCGGAUCUGCUACCUGCAGGAGAUCUUCAGCAACG
AGAUGGCCAAGGUGGACGACAGCUUCUUCCACCGGCUGGAGGAGA
GCUUCCUGGUGGAGGAGGACAAGAAGCACGAGCGGCACCCCAUCU
UCGGCAACAUCGUGGACGAGGUGGCCUACCACGAGAAGUACCCCA
CCAUCUACCACCUGCGGAAGAAGCUGGUGGACAGCACCGACAAGG
CCGACCUGCGGCUGAUCUACCUGGCCCUGGCCCACAUGAUCAAGU
UCCGGGGCCACUUCCUGAUCGAGGGCGACCUGAACCCCGACAACA
GCGACGUGGACAAGCUGUUCAUCCAGCUGGUGCAGACCUACAACC
AGCUGUUCGAGGAGAACCCCAUCAACGCCAGCGGCGUGGACGCCA
AGGCCAUCCUGAGCGCCCGGCUGAGCAAGAGCCGGCGGCUGGAGA
ACCUGAUCGCCCAGCUGCCCGGCGAGAAGAAGAACGGCCUGUUCG
GCAACCUGAUCGCCCUGAGCCUGGGCCUGACCCCCAACUUCAAGA
GCAACUUCGACCUGGCCGAGGACGCCAAGCUGCAGCUGAGCAAGG
ACACCUACGACGACGACCUGGACAACCUGCUGGCCCAGAUCGGCG
ACCAGUACGCCGACCUGUUCCUGGCCGCCAAGAACCUGAGCGACG
CCAUCCUGCUGAGCGACAUCCUGCGGGUGAACACCGAGAUCACCA
AGGCCCCCCUGAGCGCCAGCAUGAUCAAGCGGUACGACGAGCACC
ACCAGGACCUGACCCUGCUGAAGGCCCUGGUGCGGCAGCAGCUGC
CCGAGAAGUACAAGGAGAUCUUCUUCGACCAGAGCAAGAACGGCU
ACGCCGGCUACAUCGACGGCGGCGCCAGCCAGGAGGAGUUCUACA
AGUUCAUCAAGCCCAUCCUGGAGAAGAUGGACGGCACCGAGGAGC
UGCUGGUGAAGCUGAACCGGGAGGACCUGCUGCGGAAGCAGCGGA
CCUUCGACAACGGCAGCAUCCCCCACCAGAUCCACCUGGGCGAGC
UGCACGCCAUCCUGCGGCGGCAGGAGGACUUCUACCCCUUCCUGA
AGGACAACCGGGAGAAGAUCGAGAAGAUCCUGACCUUCCGGAUCC
CCUACUACGUGGGCCCCCUGGCCCGGGGCAACAGCCGGUUCGCCU
GGAUGACCCGGAAAUCCGAGGAGACCAUCACCCCCUGGAACUUCG
AGGAGGUGGUGGACAAGGGCGCCAGCGCCCAGAGCUUCAUCGAGC
GGAUGACCAACUUCGACAAGAACCUGCCCAACGAGAAGGUGCUGC
CCAAGCACAGCCUGCUGUACGAGUACUUCACCGUGUACAACGAGC
UGACCAAGGUGAAGUACGUGACCGAGGGCAUGCGGAAGCCCGCCU
UCCUGAGCGGCGAGCAGAAGAAGGCCAUCGUGGACCUGCUGUUCA
AGACCAACCGGAAGGUGACCGUGAAGCAGCUGAAGGAGGACUACU
UCAAGAAGAUCGAGUGCUUCGACAGCGUGGAGAUCAGCGGCGUGG
AGGACCGGUUCAACGCCAGCCUGGGCACCUACCACGACCUGCUGA
AGAUCAUCAAGGACAAGGACUUCCUGGACAACGAGGAGAACGAGG
ACAUCCUGGAGGACAUCGUGCUGACCCUGACCCUGUUCGAGGACC
GGGAGAUGAUCGAGGAGCGGCUGAAAACCUACGCCCACCUGUUCG
ACGACAAGGUGAUGAAGCAGCUGAAGCGGCGGCGGUACACCGGCU
GGGGCCGGCUGAGCCGGAAGCUGAUCAACGGCAUCCGGGACAAGC
AGAGCGGCAAGACCAUCCUGGACUUCCUGAAAUCCGACGGCUUCG
CCAACCGGAACUUCAUGCAGCUGAUCCACGACGACAGCCUGACCU
UCAAGGAGGACAUCCAGAAGGCCCAGGUGAGCGGCCAGGGCGACA
GCCUGCACGAGCACAUCGCCAACCUGGCCGGCAGCCCCGCCAUCA
AGAAGGGCAUCCUGCAGACCGUGAAGGUGGUGGACGAGCUGGUGA
AGGUGAUGGGCCGGCACAAGCCCGAGAACAUCGUGAUCGAGAUGG
CCCGGGAGAACCAGACCACCCAGAAGGGCCAGAAGAACAGCCGGG
AGCGGAUGAAGCGGAUCGAGGAGGGCAUCAAGGAGCUGGGCAGCC
AGAUCCUGAAGGAGCACCCCGUGGAGAACACCCAGCUGCAGAACG
AGAAGCUGUACCUGUACUACCUGCAGAACGGCCGGGACAUGUACG
UGGACCAGGAGCUGGACAUCAACCGGCUGAGCGACUACGACGUGG
CCGCCAUCGUGCCCCAGAGCUUCCUGAAGGACGACAGCAUCGACA
ACAAGGUGCUGACCCGGAGCGACAAGGCCCGGGGCAAGAGCGACA
ACGUGCCCAGCGAGGAGGUGGUGAAGAAGAUGAAGAACUACUGGC
GGCAGCUGCUGAACGCCAAGCUGAUCACCCAGCGGAAGUUCGACA
ACCUGACCAAGGCCGAGCGGGGCGGCCUGAGCGAGCUGGACAAGG
CCGGCUUCAUCAAGCGGCAGCUGGUGGAGACCCGGCAGAUCACCA
AGCACGUGGCCCAGAUCCUGGACAGCCGGAUGAACACCAAGUACG
ACGAGAACGACAAGCUGAUCCGGGAGGUGAAGGUGAUCACCCUGA
AAUCCAAGCUGGUGAGCGACUUCCGGAAGGACUUCCAGUUCUACA
AGGUGCGGGAGAUCAACAACUACCACCACGCCCACGACGCCUACC
UGAACGCCGUGGUGGGCACCGCCCUGAUCAAGAAGUACCCCAAGC
UGGAGAGCGAGUUCGUGUACGGCGACUACAAGGUGUACGACGUGC
GGAAGAUGAUCGCCAAGAGCGAGCAGGAGAUCGGCAAGGCCACCG
CCAAGUACUUCUUCUACAGCAACAUCAUGAACUUCUUCAAGACCG
AGAUCACCCUGGCCAACGGCGAGAUCCGGAAGCGGCCCCUGAUCG
AGACCAACGGCGAGACCGGCGAGAUCGUGUGGGACAAGGGCCGGG
ACUUCGCCACCGUGCGGAAGGUGCUGAGCAUGCCCCAGGUGAACA
UCGUGAAGAAAACCGAGGUGCAGACCGGCGGCUUCAGCAAGGAGA
GCAUCCUGCCCAAGCGGAACAGCGACAAGCUGAUCGCCCGGAAGA
AGGACUGGGACCCCAAGAAGUACGGCGGCUUCGACAGCCCCACCG
UGGCCUACAGCGUGCUGGUGGUGGCCAAGGUGGAGAAGGGCAAGA
GCAAGAAGCUGAAAUCCGUGAAGGAGCUGCUGGGCAUCACCAUCA
UGGAGCGGAGCAGCUUCGAGAAGAACCCCAUCGACUUCCUGGAGG
CCAAGGGCUACAAGGAGGUGAAGAAGGACCUGAUCAUCAAGCUGC
CCAAGUACAGCCUGUUCGAGCUGGAGAACGGCCGGAAGCGGAUGC
UGGCCAGCGCCGGCGAGCUGCAGAAGGGCAACGAGCUGGCCCUGC
CCAGCAAGUACGUGAACUUCCUGUACCUGGCCAGCCACUACGAGA
AGCUGAAGGGCAGCCCCGAGGACAACGAGCAGAAGCAGCUGUUCG
UGGAGCAGCACAAGCACUACCUGGACGAGAUCAUCGAGCAGAUCA
GCGAGUUCAGCAAGCGGGUGAUCCUGGCCGACGCCAACCUGGACA
AGGUGCUGAGCGCCUACAACAAGCACCGGGACAAGCCCAUCCGGG
AGCAGGCCGAGAACAUCAUCCACCUGUUCACCCUGACCAACCUGG
GCGCCCCCGCCGCCUUCAAGUACUUCGACACCACCAUCGACCGGA
AGCGGUACACCAGCACCAAGGAGGUGCUGGACGCCACCCUGAUCC
ACCAGAGCAUCACCGGCCUGUACGAGACCCGGAUCGACCUGAGCC
AGCUGGGCGGCGACAGCGGCGGCAAGCGGCCCGCCGCCACCAAGA
AGGCCGGCCAGGCCAAGAAGAAGAAGUCGGGCGGGGGUGGCUCAG
AGGAGCCCGAGGAGCCCGCCGAUAGCGGACAAUCUCUGGUGCCCG
UCUACAUCUACAGCCCCGAAUAUGUGAGCAUGUGUGAUUCCCUCG
CCAAGAUCCCUAAGAGAGCCAGCAUGGUGCAUUCUCUGAUCGAGG
CCUACGCUCUGCAUAAGCAAAUGAGGAUCGUGAAGCCCAAGGUCG
CCAGCAUGGAAGAGAUGGCCACCUUUCACACCGAUGCCUACCUCC
AACAUCUCCAGAAGGUGUCCCAAGAGGGCGACGACGACCACCCCG
ACUCCAUUGAGUACGGACUGGGCUAUGAUUGCCCCGCCACCGAGG
GCAUCUUUGACUAUGCCGCCGCUAUCGGCGGAGCUACCAUCACAG
CCGCCCAGUGUCUGAUUGAUGGCAUGUGCAAGGUCGCCAUCAACU
GGUCCGGAGGCUGGCAUCAUGCCAAGAAGGAUGAGGCCUCCGGCU
UCUGUUAUCUGAAUGACGCCGUGCUGGGCAUUCUGAGACUGAGGA
GGAAAUUCGAGAGGAUUCUGUACGUGGAUCUGGAUCUGCAUCACG
GAGAUGGAGUCGAAGAUGCCUUCAGCUUCACCAGCAAGGUGAUGA
CAGUCUCUCUGCACAAGUUCUCCCCCGGCUUCUUUCCCGGAACCG
GCGACGUGUCCGACGUGGGACUGGGCAAGGGAAGGUACUACAGCG
UGAACGUGCCCAUUCAAGACGGCAUCCAAGACGAGAAGUACUACC
AGAUCUGCGAGUCCGUGCUCAAGGAGGUCUACCAAGCCUUCAAUC
CUAAGGCUGUCGUGCUCCAACUGGGAGCUGAUACCAUUGCUGGCG
AUCCCAUGUGCAGCUUCAAUAUGACACCCGUCGGAAUCGGCAAGU
GCCUCAAGUACAUCCUCCAGUGGCAGCUCGCCACCCUCAUUCUCG
GAGGAGGCGGAUACAAUCUGGCUAAUACCGCCAGAUGCUGGACCU
AUCUGACCGGCGUGAUUCUGGGCAAAACACUGAGCAGCGAAAUCC
CCGACCACGAGUUUUUCACCGCUUACGGCCCCGACUACGUGCUGG
AGAUCACCCCCAGCUGCAGACCCGAUAGAAACGAACCCCAUAGAA
UCCAGCAAAUUCUGAACUAUAUCAAGGGCAACCUCAAGCACGUCG
UGGGAGGUGGCGGAUCGGGAAAGCGGCCCGCCGCCACCAAGAAGG
CCGGUCAGGCCAAGAAGAAGAAGGGCAGCUACCCCUACGACGUGC
CCGACUACGCCUGAGCGGCCGCUUAAUUAAGCUGCCUUCUGCGGG
GCUUGCCUUCUGGCCAUGCCCUUCUUCUCUCCCUUGCACCUGUAC
CUCUUGGUCUUUGAAUAAAGCCUGAGUAGGAAGUCUAGAAAAAAA
AAAAAAAAAAAAAAAAAAAAAAAAAAAAAAAAAAAAAAAAAAAAA
AAAAAAAAAAAAAAAAAAAAAAAAAAAA

[0217] In some embodiments, a site-specific disrupting agent comprises the amino acid sequence of SEQ ID NOs: 214 or 78. In some embodiments, a site-specific disrupting agent described herein comprises an amino acid sequence of SEQ ID NO: 214 or 78 or a sequence with at least 80, 85, 90, 95, 99, or 100% identity thereto, or having no more than 20, 19, 18, 17, 16, 15, 14, 13, 12, 11, 10, 9, 8, 7, 6, 5, 4, 3, 2, or 1 positions of difference thereto.

dCas9-HDAC8 Protein Sequence
(corresponding to MR 29439)
(SEQ ID NO: 214)
MAPKKKRKVGIHGVPAADKKYSIGLAIGTNSVGWAVITDEYKVPS
KKFKVLGNTDRHSIKKNLIGALLFDSGETAEATRLKRTARRRYTR
RKNRICYLQEIFSNEMAKVDDSFFHRLEESFLVEEDKKHERHPIF
GNIVDEVAYHEKYPTIYHLRKKLVDSTDKADLRLIYLALAHMIKF
RGHFLIEGDLNPDNSDVDKLFIQLVQTYNQLFEENPINASGVDAK
AILSARLSKSRRLENLIAQLPGEKKNGLFGNLIALSLGLTPNFKS
NFDLAEDAKLQLSKDTYDDDLDNLLAQIGDQYADLFLAAKNLSDA
ILLSDILRVNTEITKAPLSASMIKRYDEHHQDLTLLKALVRQQLP
EKYKEIFFDQSKNGYAGYIDGGASQEEFYKFIKPILEKMDGTEEL
LVKLNREDLLRKQRTFDNGSIPHQIHLGELHAILRRQEDFYPFLK
DNREKIEKILTFRIPYYVGPLARGNSRFAWMTRKSEETITPWNFE
EVVDKGASAQSFIERMTNFDKNLPNEKVLPKHSLLYEYFTVYNEL
TKVKYVTEGMRKPAFLSGEQKKAIVDLLFKTNRKVTVKQLKEDYF
KKIECFDSVEISGVEDRFNASLGTYHDLLKIIKDKDFLDNEENED
ILEDIVLTLTLFEDREMIEERLKTYAHLFDDKVMKQLKRRRYTGW
GRLSRKLINGIRDKQSGKTILDFLKSDGFANRNFMQLIHDDSLTF
KEDIQKAQVSGQGDSLHEHIANLAGSPAIKKGILQTVKVVDELVK
VMGRHKPENIVIEMARENQTTQKGQKNSRERMKRIEEGIKELGSQ
ILKEHPVENTQLQNEKLYLYYLQNGRDMYVDQELDINRLSDYDVA
AIVPQSFLKDDSIDNKVLTRSDKARGKSDNVPSEEVVKKMKNYWR
QLLNAKLITQRKFDNLTKAERGGLSELDKAGFIKRQLVETRQITK
HVAQILDSRMNTKYDENDKLIREVKVITLKSKLVSDFRKDFQFYK
VREINNYHHAHDAYLNAVVGTALIKKYPKLESEFVYGDYKVYDVR
KMIAKSEQEIGKATAKYFFYSNIMNFFKTEITLANGEIRKRPLIE
TNGETGEIVWDKGRDFATVRKVLSMPQVNIVKKTEVQTGGFSKES
ILPKRNSDKLIARKKDWDPKKYGGFDSPTVAYSVLVVAKVEKGKS
KKLKSVKELLGITIMERSSFEKNPIDFLEAKGYKEVKKDLIIKLP
KYSLFELENGRKRMLASAGELQKGNELALPSKYVNFLYLASHYEK
LKGSPEDNEQKQLFVEQHKHYLDEIIEQISEFSKRVILADANLDK
VLSAYNKHRDKPIREQAENIIHLFTLTNLGAPAAFKYFDTTIDRK
RYTSTKEVLDATLIHQSITGLYETRIDLSQLGGDSGGKRPAATKK
AGQAKKKKSGGGGSEEPEEPADSGQSLVPVYIYSPEYVSMCDSLA
KIPKRASMVHSLIEAYALHKQMRIVKPKVASMEEMATFHTDAYLQ
HLQKVSQEGDDDHPDSIEYGLGYDCPATEGIFDYAAAIGGATITA
AQCLIDGMCKVAINWSGGWHHAKKDEASGFCYLNDAVLGILRLRR
KFERILYVDLDLHHGDGVEDAFSFTSKVMTVSLHKFSPGFFPGTG
DVSDVGLGKGRYYSVNVPIQDGIQDEKYYQICESVLKEVYQAFNP
KAVVLQLGADTIAGDPMCSFNMTPVGIGKCLKYILQWQLATLILG
GGGYNLANTARCWTYLTGVILGKTLSSEIPDHEFFTAYGPDYVLE
ITPSCRPDRNEPHRIQQILNYIKGNLKHVVGGGGSGKRPAATKKA
GQAKKKKGSYPYDVPDYA
dCas9-HDAC8 without HA tag
(SEQ ID NO: 78)
MAPKKKRKVGIHGVPAADKKYSIGLAIGTNSVGWAVITDEYKVPS
KKFKVLGNTDRHSIKKNLIGALLFDSGETAEATRLKRTARRRYTR
RKNRICYLQEIFSNEMAKVDDSFFHRLEESFLVEEDKKHERHPIF
GNIVDEVAYHEKYPTIYHLRKKLVDSTDKADLRLIYLALAHMIKF
RGHFLIEGDLNPDNSDVDKLFIQLVQTYNQLFEENPINASGVDAK
AILSARLSKSRRLENLIAQLPGEKKNGLFGNLIALSLGLTPNFKS
NFDLAEDAKLQLSKDTYDDDLDNLLAQIGDQYADLFLAAKNLSDA
ILLSDILRVNTEITKAPLSASMIKRYDEHHQDLTLLKALVRQQLP
EKYKEIFFDQSKNGYAGYIDGGASQEEFYKFIKPILEKMDGTEEL
LVKLNREDLLRKQRTFDNGSIPHQIHLGELHAILRRQEDFYPFLK
DNREKIEKILTFRIPYYVGPLARGNSRFAWMTRKSEETITPWNFE
EVVDKGASAQSFIERMTNFDKNLPNEKVLPKHSLLYEYFTVYNEL
TKVKYVTEGMRKPAFLSGEQKKAIVDLLFKTNRKVTVKQLKEDYF
KKIECFDSVEISGVEDRFNASLGTYHDLLKIIKDKDFLDNEENED
ILEDIVLTLTLFEDREMIEERLKTYAHLFDDKVMKQLKRRRYTGW
GRLSRKLINGIRDKQSGKTILDFLKSDGFANRNFMQLIHDDSLTF
KEDIQKAQVSGQGDSLHEHIANLAGSPAIKKGILQTVKVVDELVK
VMGRHKPENIVIEMARENQTTQKGQKNSRERMKRIEEGIKELGSQ
ILKEHPVENTQLQNEKLYLYYLQNGRDMYVDQELDINRLSDYDVA
AIVPQSFLKDDSIDNKVLTRSDKARGKSDNVPSEEVVKKMKNYWR
QLLNAKLITQRKFDNLTKAERGGLSELDKAGFIKRQLVETRQITK
HVAQILDSRMNTKYDENDKLIREVKVITLKSKLVSDFRKDFQFYK
VREINNYHHAHDAYLNAVVGTALIKKYPKLESEFVYGDYKVYDVR
KMIAKSEQEIGKATAKYFFYSNIMNFFKTEITLANGEIRKRPLIE
TNGETGEIVWDKGRDFATVRKVLSMPQVNIVKKTEVQTGGFSKES
ILPKRNSDKLIARKKDWDPKKYGGFDSPTVAYSVLVVAKVEKGKS
KKLKSVKELLGITIMERSSFEKNPIDFLEAKGYKEVKKDLIIKLP
KYSLFELENGRKRMLASAGELQKGNELALPSKYVNFLYLASHYEK
LKGSPEDNEQKQLFVEQHKHYLDEIIEQISEFSKRVILADANLDK
VLSAYNKHRDKPIREQAENIIHLFTLTNLGAPAAFKYFDTTIDRK
RYTSTKEVLDATLIHQSITGLYETRIDLSQLGGDSGGKRPAATKK
AGQAKKKKSGGGGSEEPEEPADSGQSLVPVYIYSPEYVSMCDSLA
KIPKRASMVHSLIEAYALHKQMRIVKPKVASMEEMATFHTDAYLQ
HLQKVSQEGDDDHPDSIEYGLGYDCPATEGIFDYAAAIGGATITA
AQCLIDGMCKVAINWSGGWHHAKKDEASGFCYLNDAVLGILRLRR
KFERILYVDLDLHHGDGVEDAFSFTSKVMTVSLHKFSPGFFPGTG
DVSDVGLGKGRYYSVNVPIQDGIQDEKYYQICESVLKEVYQAFNP
KAVVLQLGADTIAGDPMCSFNMTPVGIGKCLKYILQWQLATLILG
GGGYNLANTARCWTYLTGVILGKTLSSEIPDHEFFTAYGPDYVLE
ITPSCRPDRNEPHRIQQILNYIKGNLKHVVGGGGSGKRPAATKKA
GQAKKKKGS

[0218] In some embodiments, a site-specific disrupting agent comprises a targeting moiety (e.g., comprising dCas9, e.g., an S. aureus dCas9), a first effector moiety comprising EZH2; e.g., an EZH2 domain, and a second effector moiety comprising HDAC8, e.g., an HDAC8 domain. In some embodiments, a site-specific disrupting agent comprises a targeting moiety comprising dCas9, e.g., an S. pyogenes dCas9, e.g., a mutant S. pyogenes Cas9, e.g., Cas9m4; a first effector moiety comprising EZH2, e.g., an EZH2 domain; and a second effector moiety comprising HDAC8, e.g., an HDAC8 domain. In some embodiments, the site-specific disrupting agent is encoded by the nucleic acid sequence of SEQ ID NO: 215 (e.g., mRNA encoding the site-specific disrupting agent). In some embodiments, a nucleic acid described herein comprises a nucleic acid sequence of SEQ ID NO: 215 or a sequence with at least 80, 85, 90, 95, 99, or 100% identity thereto, or having no more than 20, 19, 18, 17, 16, 15, 14, 13, 12, 11, 10, 9, 8, 7, 6, 5, 4, 3, 2, or 1 positions of difference thereto.

EZH2-dCas9-HDAC8 mRNA (MR-29447)
(SEQ ID NO: 215)
AGGAAAUAAGAGAGAAAAGAAGAGUAAGAAGAAAUAUAAGAGCCA
CCAUGGCCCCCAAGAAGAAGCGGAAGGUGGGCGGCAGCGGCGGCA
GCGGCCAGACCGGCAAGAAGAGCGAGAAGGGCCCCGUGUGCUGGC
GGAAGCGGGUGAAGAGCGAGUACAUGCGGCUGCGGCAGCUGAAGC
GGUUCCGGCGGGCCGACGAGGUGAAGAGCAUGUUCAGCAGCAACC
GGCAGAAGAUCCUGGAGCGGACCGAGAUCCUGAACCAGGAGUGGA
AGCAGCGGCGAAUCCAGCCCGUGCACAUCCUGACCAGCGUGAGCA
GCCUGCGGGGCACCCGGGAGUGCAGCGUGACCAGCGACCUGGACU
UCCCCACCCAGGUGAUCCCCCUAAAGACCCUGAACGCCGUGGCCA
GCGUGCCCAUCAUGUACAGCUGGAGCCCCCUGCAGCAGAACUUCA
UGGUGGAGGACGAGACCGUGCUGCACAACAUCCCCUACAUGGGCG
ACGAGGUGCUGGACCAGGACGGCACCUUCAUCGAGGAGCUGAUCA
AGAACUACGACGGCAAGGUGCACGGCGACCGGGAGUGCGGCUUCA
UCAACGACGAGAUCUUCGUGGAGCUGGUGAACGCCCUGGGCCAGU
ACAACGACGACGACGACGACGACGACGGCGACGACCCCGAGGAGC
GGGAGGAGAAGCAGAAGGACCUGGAGGACCACCGGGACGACAAGG
AGAGCCGGCCCCCCCGGAAGUUCCCCAGCGACAAGAUCUUCGAGG
CCAUCAGCAGCAUGUUCCCCGACAAGGGCACCGCCGAGGAGCUGA
AGGAGAAGUACAAGGAGCUGACCGAGCAGCAGCUGCCCGGCGCCC
UGCCCCCCGAGUGCACCCCCAACAUCGACGGCCCCAACGCCAAGA
GCGUGCAGCGGGAGCAGAGCCUGCACAGCUUCCACACCCUGUUCU
GCCGGCGGUGCUUCAAGUACGACUGCUUCCUGCACCCCUUCCACG
CCACCCCCAACACCUACAAGCGGAAGAACACCGAGACCGCCCUGG
ACAACAAGCCCUGCGGCCCCCAGUGCUACCAGCACCUGGAGGGCG
CCAAGGAGUUCGCCGCCGCCCUGACCGCCGAGCGGAUCAAGACCC
CCCCCAAGCGGCCCGGCGGCCGGCGGCGGGGCCGGCUGCCCAACA
ACAGCAGCCGGCCCAGCACCCCCACCAUCAACGUGCUGGAGAGCA
AGGACACCGACAGCGACCGGGAGGCCGGCACCGAGACCGGCGGCG
AGAACAACGACAAGGAGGAGGAGGAGAAGAAGGACGAGACCAGCA
GCAGCAGCGAGGCCAACAGCCGGUGCCAGACCCCCAUCAAGAUGA
AGCCCAACAUCGAGCCCCCCGAGAACGUGGAGUGGAGCGGCGCCG
AGGCCAGCAUGUUCCGGGUGCUGAUCGGCACCUACUACGACAACU
UCUGCGCCAUCGCCCGGCUGAUCGGCACCAAGACCUGCCGGCAGG
UGUACGAGUUCCGGGUGAAGGAGAGCAGCAUCAUCGCCCCCGCCC
CCGCCGAGGACGUGGACACCCCCCCCCGGAAGAAGAAGCGGAAGC
ACCGGCUGUGGGCCGCCCACUGCCGGAAGAUCCAGCUGAAGAAGG
ACGGCAGCAGCAACCACGUGUACAACUACCAGCCCUGCGACCACC
CCCGGCAGCCCUGCGACAGCAGCUGCCCCUGCGUGAUCGCCCAGA
ACUUCUGCGAGAAGUUCUGCCAGUGCAGCAGCGAGUGCCAGAACC
GGUUCCCCGGCUGCCGGUGCAAGGCCCAGUGCAACACCAAGCAGU
GCCCCUGCUACCUGGCCGUGCGGGAGUGCGACCCCGACCUGUGCC
UGACCUGCGGCGCCGCCGACCACUGGGACAGCAAGAACGUGAGCU
GCAAGAACUGCAGCAUCCAGCGGGGCAGCAAGAAGCACCUGCUGC
UGGCCCCCAGCGACGUGGCCGGCUGGGGCAUCUUCAUCAAGGACC
CCGUGCAGAAGAACGAGUUCAUCAGCGAGUACUGCGGCGAGAUCA
UCAGCCAGGACGAGGCCGACCGGCGGGGCAAGGUGUACGACAAGU
ACAUGUGCAGCUUCCUGUUCAACCUGAACAACGACUUCGUGGUGG
ACGCCACCCGGAAGGGCAACAAGAUCCGGUUCGCCAACCACAGCG
UGAACCCCAACUGCUACGCCAAGGUGAUGAUGGUGAACGGCGACC
ACCGGAUCGGCAUCUUCGCCAAGCGGGCCAUCCAGACCGGCGAGG
AGCUGUUCUUCGACUACCGGUACAGCCAGGCCGACGCCCUGAAGU
ACGUGGGCAUCGAGCGGGAGAUGGAGAUCCCCAGCACCGGCGGCA
GCGGCGGCAGCGGCGGCAGCGGCGGCAGCGGCGGCAGCGGCCGAC
CCGACAAGAAGUACAGCAUCGGCCUGGCCAUCGGCACCAACAGCG
UGGGCUGGGCCGUGAUCACCGACGAGUACAAGGUGCCCAGCAAGA
AGUUCAAGGUGCUGGGCAACACCGACCGGCACAGCAUCAAGAAGA
ACCUGAUCGGCGCCCUGCUGUUCGACAGCGGCGAGACCGCCGAGG
CCACCCGGCUGAAGCGGACCGCCCGGCGGCGGUACACCCGGCGGA
AGAACCGGAUCUGCUACCUGCAGGAGAUCUUCAGCAACGAGAUGG
CCAAGGUGGACGACAGCUUCUUCCACCGGCUGGAGGAGAGCUUCC
UGGUGGAGGAGGACAAGAAGCACGAGCGGCACCCCAUCUUCGGCA
ACAUCGUGGACGAGGUGGCCUACCACGAGAAGUACCCCACCAUCU
ACCACCUGCGGAAGAAGCUGGUGGACAGCACCGACAAGGCCGACC
UGCGGCUGAUCUACCUGGCCCUGGCCCACAUGAUCAAGUUCCGGG
GCCACUUCCUGAUCGAGGGCGACCUGAACCCCGACAACAGCGACG
UGGACAAGCUGUUCAUCCAGCUGGUGCAGACCUACAACCAGCUGU
UCGAGGAGAACCCCAUCAACGCCAGCGGCGUGGACGCCAAGGCCA
UCCUGAGCGCCCGGCUGAGCAAGAGCCGGCGGCUGGAGAACCUGA
UCGCCCAGCUGCCCGGCGAGAAGAAGAACGGCCUGUUCGGCAACC
UGAUCGCCCUGAGCCUGGGCCUGACCCCCAACUUCAAGAGCAACU
UCGACCUGGCCGAGGACGCCAAGCUGCAGCUGAGCAAGGACACCU
ACGACGACGACCUGGACAACCUGCUGGCCCAGAUCGGCGACCAGU
ACGCCGACCUGUUCCUGGCCGCCAAGAACCUGAGCGACGCCAUCC
UGCUGAGCGACAUCCUGCGGGUGAACACCGAGAUCACCAAGGCCC
CCCUGAGCGCCAGCAUGAUCAAGCGGUACGACGAGCACCACCAGG
ACCUGACCCUGCUGAAGGCCCUGGUGCGGCAGCAGCUGCCCGAGA
AGUACAAGGAGAUCUUCUUCGACCAGAGCAAGAACGGCUACGCCG
GCUACAUCGACGGCGGCGCCAGCCAGGAGGAGUUCUACAAGUUCA
UCAAGCCCAUCCUGGAGAAGAUGGACGGCACCGAGGAGCUGCUGG
UGAAGCUGAACCGGGAGGACCUGCUGCGGAAGCAGCGGACCUUCG
ACAACGGCAGCAUCCCCCACCAGAUCCACCUGGGCGAGCUGCACG
CCAUCCUGCGGCGGCAGGAGGACUUCUACCCCUUCCUGAAGGACA
ACCGGGAGAAGAUCGAGAAGAUCCUGACCUUCCGGAUCCCCUACU
ACGUGGGCCCCCUGGCCCGGGGCAACAGCCGGUUCGCCUGGAUGA
CCCGGAAAUCCGAGGAGACCAUCACCCCCUGGAACUUCGAGGAGG
UGGUGGACAAGGGCGCCAGCGCCCAGAGCUUCAUCGAGCGGAUGA
CCAACUUCGACAAGAACCUGCCCAACGAGAAGGUGCUGCCCAAGC
ACAGCCUGCUGUACGAGUACUUCACCGUGUACAACGAGCUGACCA
AGGUGAAGUACGUGACCGAGGGCAUGCGGAAGCCCGCCUUCCUGA
GCGGCGAGCAGAAGAAGGCCAUCGUGGACCUGCUGUUCAAGACCA
ACCGGAAGGUGACCGUGAAGCAGCUGAAGGAGGACUACUUCAAGA
AGAUCGAGUGCUUCGACAGCGUGGAGAUCAGCGGCGUGGAGGACC
GGUUCAACGCCAGCCUGGGCACCUACCACGACCUGCUGAAGAUCA
UCAAGGACAAGGACUUCCUGGACAACGAGGAGAACGAGGACAUCC
UGGAGGACAUCGUGCUGACCCUGACCCUGUUCGAGGACCGGGAGA
UGAUCGAGGAGCGGCUGAAAACCUACGCCCACCUGUUCGACGACA
AGGUGAUGAAGCAGCUGAAGCGGCGGCGGUACACCGGCUGGGGCC
GGCUGAGCCGGAAGCUGAUCAACGGCAUCCGGGACAAGCAGAGCG
GCAAGACCAUCCUGGACUUCCUGAAAUCCGACGGCUUCGCCAACC
GGAACUUCAUGCAGCUGAUCCACGACGACAGCCUGACCUUCAAGG
AGGACAUCCAGAAGGCCCAGGUGAGCGGCCAGGGCGACAGCCUGC
ACGAGCACAUCGCCAACCUGGCCGGCAGCCCCGCCAUCAAGAAGG
GCAUCCUGCAGACCGUGAAGGUGGUGGACGAGCUGGUGAAGGUGA
UGGGCCGGCACAAGCCCGAGAACAUCGUGAUCGAGAUGGCCCGGG
AGAACCAGACCACCCAGAAGGGCCAGAAGAACAGCCGGGAGCGGA
UGAAGCGGAUCGAGGAGGGCAUCAAGGAGCUGGGCAGCCAGAUCC
UGAAGGAGCACCCCGUGGAGAACACCCAGCUGCAGAACGAGAAGC
UGUACCUGUACUACCUGCAGAACGGCCGGGACAUGUACGUGGACC
AGGAGCUGGACAUCAACCGGCUGAGCGACUACGACGUGGCCGCCA
UCGUGCCCCAGAGCUUCCUGAAGGACGACAGCAUCGACAACAAGG
UGCUGACCCGGAGCGACAAGGCCCGGGGCAAGAGCGACAACGUGC
CCAGCGAGGAGGUGGUGAAGAAGAUGAAGAACUACUGGCGGCAGC
UGCUGAACGCCAAGCUGAUCACCCAGCGGAAGUUCGACAACCUGA
CCAAGGCCGAGCGGGGCGGCCUGAGCGAGCUGGACAAGGCCGGCU
UCAUCAAGCGGCAGCUGGUGGAGACCCGGCAGAUCACCAAGCACG
UGGCCCAGAUCCUGGACAGCCGGAUGAACACCAAGUACGACGAGA
ACGACAAGCUGAUCCGGGAGGUGAAGGUGAUCACCCUGAAAUCCA
AGCUGGUGAGCGACUUCCGGAAGGACUUCCAGUUCUACAAGGUGC
GGGAGAUCAACAACUACCACCACGCCCACGACGCCUACCUGAACG
CCGUGGUGGGCACCGCCCUGAUCAAGAAGUACCCCAAGCUGGAGA
GCGAGUUCGUGUACGGCGACUACAAGGUGUACGACGUGCGGAAGA
UGAUCGCCAAGAGCGAGCAGGAGAUCGGCAAGGCCACCGCCAAGU
ACUUCUUCUACAGCAACAUCAUGAACUUCUUCAAGACCGAGAUCA
CCCUGGCCAACGGCGAGAUCCGGAAGCGGCCCCUGAUCGAGACCA
ACGGCGAGACCGGCGAGAUCGUGUGGGACAAGGGCCGGGACUUCG
CCACCGUGCGGAAGGUGCUGAGCAUGCCCCAGGUGAACAUCGUGA
AGAAAACCGAGGUGCAGACCGGCGGCUUCAGCAAGGAGAGCAUCC
UGCCCAAGCGGAACAGCGACAAGCUGAUCGCCCGGAAGAAGGACU
GGGACCCCAAGAAGUACGGCGGCUUCGACAGCCCCACCGUGGCCU
ACAGCGUGCUGGUGGUGGCCAAGGUGGAGAAGGGCAAGAGCAAGA
AGCUGAAAUCCGUGAAGGAGCUGCUGGGCAUCACCAUCAUGGAGC
GGAGCAGCUUCGAGAAGAACCCCAUCGACUUCCUGGAGGCCAAGG
GCUACAAGGAGGUGAAGAAGGACCUGAUCAUCAAGCUGCCCAAGU
ACAGCCUGUUCGAGCUGGAGAACGGCCGGAAGCGGAUGCUGGCCA
GCGCCGGCGAGCUGCAGAAGGGCAACGAGCUGGCCCUGCCCAGCA
AGUACGUGAACUUCCUGUACCUGGCCAGCCACUACGAGAAGCUGA
AGGGCAGCCCCGAGGACAACGAGCAGAAGCAGCUGUUCGUGGAGC
AGCACAAGCACUACCUGGACGAGAUCAUCGAGCAGAUCAGCGAGU
UCAGCAAGCGGGUGAUCCUGGCCGACGCCAACCUGGACAAGGUGC
UGAGCGCCUACAACAAGCACCGGGACAAGCCCAUCCGGGAGCAGG
CCGAGAACAUCAUCCACCUGUUCACCCUGACCAACCUGGGCGCCC
CCGCCGCCUUCAAGUACUUCGACACCACCAUCGACCGGAAGCGGU
ACACCAGCACCAAGGAGGUGCUGGACGCCACCCUGAUCCACCAGA
GCAUCACCGGCCUGUACGAGACCCGGAUCGACCUGAGCCAGCUGG
GCGGCGACAGCGGCGGCAAGCGGCCCGCCGCCACCAAGAAGGCCG
GCCAGGCCAAGAAGAAGAAGUCGGGCGGGGGUGGCUCAGAGGAGC
CCGAGGAGCCCGCCGAUAGCGGACAAUCUCUGGUGCCCGUCUACA
UCUACAGCCCCGAAUAUGUGAGCAUGUGUGAUUCCCUCGCCAAGA
UCCCUAAGAGAGCCAGCAUGGUGCAUUCUCUGAUCGAGGCCUACG
CUCUGCAUAAGCAAAUGAGGAUCGUGAAGCCCAAGGUCGCCAGCA
UGGAAGAGAUGGCCACCUUUCACACCGAUGCCUACCUCCAACAUC
UCCAGAAGGUGUCCCAAGAGGGCGACGACGACCACCCCGACUCCA
UUGAGUACGGACUGGGCUAUGAUUGCCCCGCCACCGAGGGCAUCU
UUGACUAUGCCGCCGCUAUCGGCGGAGCUACCAUCACAGCCGCCC
AGUGUCUGAUUGAUGGCAUGUGCAAGGUCGCCAUCAACUGGUCCG
GAGGCUGGCAUCAUGCCAAGAAGGAUGAGGCCUCCGGCUUCUGUU
AUCUGAAUGACGCCGUGCUGGGCAUUCUGAGACUGAGGAGGAAAU
UCGAGAGGAUUCUGUACGUGGAUCUGGAUCUGCAUCACGGAGAUG
GAGUCGAAGAUGCCUUCAGCUUCACCAGCAAGGUGAUGACAGUCU
CUCUGCACAAGUUCUCCCCCGGCUUCUUUCCCGGAACCGGCGACG
UGUCCGACGUGGGACUGGGCAAGGGAAGGUACUACAGCGUGAACG
UGCCCAUUCAAGACGGCAUCCAAGACGAGAAGUACUACCAGAUCU
GCGAGUCCGUGCUCAAGGAGGUCUACCAAGCCUUCAAUCCUAAGG
CUGUCGUGCUCCAACUGGGAGCUGAUACCAUUGCUGGCGAUCCCA
UGUGCAGCUUCAAUAUGACACCCGUCGGAAUCGGCAAGUGCCUCA
AGUACAUCCUCCAGUGGCAGCUCGCCACCCUCAUUCUCGGAGGAG
GCGGAUACAAUCUGGCUAAUACCGCCAGAUGCUGGACCUAUCUGA
CCGGCGUGAUUCUGGGCAAAACACUGAGCAGCGAAAUCCCCGACC
ACGAGUUUUUCACCGCUUACGGCCCCGACUACGUGCUGGAGAUCA
CCCCCAGCUGCAGACCCGAUAGAAACGAACCCCAUAGAAUCCAGC
AAAUUCUGAACUAUAUCAAGGGCAACCUCAAGCACGUCGUGGGAG
GUGGCGGAUCGGGAAAGCGGCCCGCCGCCACCAAGAAGGCCGGUC
AGGCCAAGAAGAAGAAGGGCAGCUACCCCUACGACGUGCCCGACU
ACGCCUGAGCGGCCGCUUAAUUAAGCUGCCUUCUGCGGGGCUUGC
CUUCUGGCCAUGCCCUUCUUCUCUCCCUUGCACCUGUACCUCUUG
GUCUUUGAAUAAAGCCUGAGUAGGAAGUCUAGAAAAAAAAAAAAA
AAAAAAAAAAAAAAAAAAAAAAAAAAAAAAAAAAAAAAAAAAAAA
AAAAAAAAAAAAAAAAAAAAAA

[0219] In some embodiments, a site-specific disrupting agent comprises the amino acid sequence of SEQ ID NOs: 216 or 79. In some embodiments, a site-specific disrupting agent described herein comprises an amino acid sequence of SEQ ID NO: 216 or 79 or a sequence with at least 80, 85, 90, 95, 99, or 100% identity thereto, or having no more than 20, 19, 18, 17, 16, 15, 14, 13, 12, 11, 10, 9, 8, 7, 6, 5, 4, 3, 2, or 1 positions of difference thereto.

EZH2-dCas9-HDAC8 Protein Sequence
(corresponding to MR-29447)
(SEQ ID NO: 216)
MAPKKKRKVGGSGGSGQTGKKSEKGPVCWRKRVKSEYMRLRQLKR
FRRADEVKSMFSSNRQKILERTEILNQEWKQRRIQPVHILTSVSS
LRGTRECSVTSDLDFPTQVIPLKTLNAVASVPIMYSWSPLQQNFM
VEDETVLHNIPYMGDEVLDQDGTFIEELIKNYDGKVHGDRECGFI
NDEIFVELVNALGQYNDDDDDDDGDDPEEREEKQKDLEDHRDDKE
SRPPRKFPSDKIFEAISSMFPDKGTAEELKEKYKELTEQQLPGAL
PPECTPNIDGPNAKSVQREQSLHSFHTLFCRRCFKYDCFLHPFHA
TPNTYKRKNTETALDNKPCGPQCYQHLEGAKEFAAALTAERIKTP
PKRPGGRRRGRLPNNSSRPSTPTINVLESKDTDSDREAGTETGGE
NNDKEEEEKKDETSSSSEANSRCQTPIKMKPNIEPPENVEWSGAE
ASMFRVLIGTYYDNFCAIARLIGTKTCRQVYEFRVKESSIIAPAP
AEDVDTPPRKKKRKHRLWAAHCRKIQLKKDGSSNHVYNYQPCDHP
RQPCDSSCPCVIAQNFCEKFCQCSSECQNRFPGCRCKAQCNTKQC
PCYLAVRECDPDLCLTCGAADHWDSKNVSCKNCSIQRGSKKHLLL
APSDVAGWGIFIKDPVQKNEFISEYCGEIISQDEADRRGKVYDKY
MCSFLFNLNNDFVVDATRKGNKIRFANHSVNPNCYAKVMMVNGDH
RIGIFAKRAIQTGEELFFDYRYSQADALKYVGIEREMEIPSTGGS
GGSGGSGGSGGSGRPDKKYSIGLAIGTNSVGWAVITDEYKVPSKK
FKVLGNTDRHSIKKNLIGALLFDSGETAEATRLKRTARRRYTRRK
NRICYLQEIFSNEMAKVDDSFFHRLEESFLVEEDKKHERHPIFGN
IVDEVAYHEKYPTIYHLRKKLVDSTDKADLRLIYLALAHMIKFRG
HFLIEGDLNPDNSDVDKLFIQLVQTYNQLFEENPINASGVDAKAI
LSARLSKSRRLENLIAQLPGEKKNGLFGNLIALSLGLTPNFKSNF
DLAEDAKLQLSKDTYDDDLDNLLAQIGDQYADLFLAAKNLSDAIL
LSDILRVNTEITKAPLSASMIKRYDEHHQDLTLLKALVRQQLPEK
YKEIFFDQSKNGYAGYIDGGASQEEFYKFIKPILEKMDGTEELLV
KLNREDLLRKQRTFDNGSIPHQIHLGELHAILRRQEDFYPFLKDN
REKIEKILTFRIPYYVGPLARGNSRFAWMTRKSEETITPWNFEEV
VDKGASAQSFIERMTNFDKNLPNEKVLPKHSLLYEYFTVYNELTK
VKYVTEGMRKPAFLSGEQKKAIVDLLFKTNRKVTVKQLKEDYFKK
IECFDSVEISGVEDRFNASLGTYHDLLKIIKDKDFLDNEENEDIL
EDIVLTLTLFEDREMIEERLKTYAHLFDDKVMKQLKRRRYTGWGR
LSRKLINGIRDKQSGKTILDFLKSDGFANRNFMQLIHDDSLTFKE
DIQKAQVSGQGDSLHEHIANLAGSPAIKKGILQTVKVVDELVKVM
GRHKPENIVIEMARENQTTQKGQKNSRERMKRIEEGIKELGSQIL
KEHPVENTQLQNEKLYLYYLQNGRDMYVDQELDINRLSDYDVAAI
VPQSFLKDDSIDNKVLTRSDKARGKSDNVPSEEVVKKMKNYWRQL
LNAKLITQRKFDNLTKAERGGLSELDKAGFIKRQLVETRQITKHV
AQILDSRMNTKYDENDKLIREVKVITLKSKLVSDFRKDFQFYKVR
EINNYHHAHDAYLNAVVGTALIKKYPKLESEFVYGDYKVYDVRKM
IAKSEQEIGKATAKYFFYSNIMNFFKTEITLANGEIRKRPLIETN
GETGEIVWDKGRDFATVRKVLSMPQVNIVKKTEVQTGGFSKESIL
PKRNSDKLIARKKDWDPKKYGGFDSPTVAYSVLVVAKVEKGKSKK
LKSVKELLGITIMERSSFEKNPIDFLEAKGYKEVKKDLIIKLPKY
SLFELENGRKRMLASAGELQKGNELALYNKHRDKPIREQAENIIH
LFTLTNLGAPAAFKYFDTTIDRKRYTSTKEVLDATLIHQSITGLY
ETRIDLSQLGGDSGGKRPAATKKAGQAKKKKSGGGGSEEPEEPAD
SGQSLVPVYIYSPEYVSMCDSLAKIPKRASMVHSLIEAYALHKQM
RIVKPKVASMEEMATFHTDAYLQHLQKVSQEGDDDHPDSIEYGLG
YDCPATEGIFDYAAAIGGATITAAQCLIDGMCKVAINWSGGWHHA
KKDEASGFCYLNDAVLGILRLRRKFERILYVDLDLHHGDGVEDAF
SFTSKVMTVSLHKFSPGFFPGTGDVSDVGLGKGRYYSVNVPIQDG
IQDEKYYQICESVLKEVYQAFNPKAVVLQLGADTIAGDPMCSFNM
TPVGIGKCLKYILQWQLATLILGGGGYNLANTARCWTYLTGVILG
KTLSSEIPDHEFFTAYGPDYVLEITPSCRPDRNEPHRIQQILNYI
KGNLKHVVGGGGSGKRPAATKKAGQAKKKKGSYPYDVPDYA
EZH2-dCas9-HDAC8 Protein Sequence
(corresponding to MR-29447)
(SEQ ID NO: 79)
MAPKKKRKVGGSGGSGQTGKKSEKGPVCWRKRVKSEYMRLRQLKR
FRRADEVKSMFSSNRQKILERTEILNQEWKQRRIQPVHILTSVSS
LRGTRECSVTSDLDFPTQVIPLKTLNAVASVPIMYSWSPLQQNFM
VEDETVLHNIPYMGDEVLDQDGTFIEELIKNYDGKVHGDRECGFI
NDEIFVELVNALGQYNDDDDDDDGDDPEEREEKQKDLEDHRDDKE
SRPPRKFPSDKIFEAISSMFPDKGTAEELKEKYKELTEQQLPGAL
PPECTPNIDGPNAKSVQREQSLHSFHTLFCRRCFKYDCFLHPFHA
TPNTYKRKNTETALDNKPCGPQCYQHLEGAKEFAAALTAERIKTP
PKRPGGRRRGRLPNNSSRPSTPTINVLESKDTDSDREAGTETGGE
NNDKEEEEKKDETSSSSEANSRCQTPIKMKPNIEPPENVEWSGAE
ASMFRVLIGTYYDNFCAIARLIGTKTCRQVYEFRVKESSIIAPAP
AEDVDTPPRKKKRKHRLWAAHCRKIQLKKDGSSNHVYNYQPCDHP
RQPCDSSCPCVIAQNFCEKFCQCSSECQNRFPGCRCKAQCNTKQC
PCYLAVRECDPDLCLTCGAADHWDSKNVSCKNCSIQRGSKKHLLL
APSDVAGWGIFIKDPVQKNEFISEYCGEIISQDEADRRGKVYDKY
MCSFLFNLNNDFVVDATRKGNKIRFANHSVNPNCYAKVMMVNGDH
RIGIFAKRAIQTGEELFFDYRYSQADALKYVGIEREMEIPSTGGS
GGSGGSGGSGGSGRPDKKYSIGLAIGTNSVGWAVITDEYKVPSKK
FKVLGNTDRHSIKKNLIGALLFDSGETAEATRLKRTARRRYTRRK
NRICYLQEIFSNEMAKVDDSFFHRLEESFLVEEDKKHERHPIFGN
IVDEVAYHEKYPTIYHLRKKLVDSTDKADLRLIYLALAHMIKFRG
HFLIEGDLNPDNSDVDKLFIQLVQTYNQLFEENPINASGVDAKAI
LSARLSKSRRLENLIAQLPGEKKNGLFGNLIALSLGLTPNFKSNF
DLAEDAKLQLSKDTYDDDLDNLLAQIGDQYADLFLAAKNLSDAIL
LSDILRVNTEITKAPLSASMIKRYDEHHQDLTLLKALVRQQLPEK
YKEIFFDQSKNGYAGYIDGGASQEEFYKFIKPILEKMDGTEELLV
KLNREDLLRKQRTFDNGSIPHQIHLGELHAILRRQEDFYPFLKDN
REKIEKILTFRIPYYVGPLARGNSRFAWMTRKSEETITPWNFEEV
VDKGASAQSFIERMTNFDKNLPNEKVLPKHSLLYEYFTVYNELTK
VKYVTEGMRKPAFLSGEQKKAIVDLLFKTNRKVTVKQLKEDYFKK
IECFDSVEISGVEDRFNASLGTYHDLLKIIKDKDFLDNEENEDIL
EDIVLTLTLFEDREMIEERLKTYAHLFDDKVMKQLKRRRYTGWGR
LSRKLINGIRDKQSGKTILDFLKSDGFANRNFMQLIHDDSLTFKE
DIQKAQVSGQGDSLHEHIANLAGSPAIKKGILQTVKVVDELVKVM
GRHKPENIVIEMARENQTTQKGQKNSRERMKRIEEGIKELGSQIL
KEHPVENTQLQNEKLYLYYLQNGRDMYVDQELDINRLSDYDVAAI
VPQSFLKDDSIDNKVLTRSDKARGKSDNVPSEEVVKKMKNYWRQL
LNAKLITQRKFDNLTKAERGGLSELDKAGFIKRQLVETRQITKHV
AQILDSRMNTKYDENDKLIREVKVITLKSKLVSDFRKDFQFYKVR
EINNYHHAHDAYLNAVVGTALIKKYPKLESEFVYGDYKVYDVRKM
IAKSEQEIGKATAKYFFYSNIMNFFKTEITLANGEIRKRPLIETN
GETGEIVWDKGRDFATVRKVLSMPQVNIVKKTEVQTGGFSKESIL
PKRNSDKLIARKKDWDPKKYGGFDSPTVAYSVLVVAKVEKGKSKK
LKSVKELLGITIMERSSFEKNPIDFLEAKGYKEVKKDLIIKLPKY
SLFELENGRKRMLASAGELQKGNELALPSKYVNFLYLASHYEKLK
GSPEDNEQKQLFVEQHKHYLDEIIEQISEFSKRVILADANLDKVL
SAYNKHRDKPIREQAENIIHLFTLTNLGAPAAFKYFDTTIDRKRY
TSTKEVLDATLIHQSITGLYETRIDLSQLGGDSGGKRPAATKKAG
QAKKKKSGGGGSEEPEEPADSGQSLVPVYIYSPEYVSMCDSLAKI
PKRASMVHSLIEAYALHKQMRIVKPKVASMEEMATFHTDAYLQHL
QKVSQEGDDDHPDSIEYGLGYDCPATEGIFDYAAAIGGATITAAQ
CLIDGMCKVAINWSGGWHHAKKDEASGFCYLNDAVLGILRLRRKF
ERILYVDLDLHHGDGVEDAFSFTSKVMTVSLHKFSPGFFPGTGDV
SDVGLGKGRYYSVNVPIQDGIQDEKYYQICESVLKEVYQAFNPKA
VVLQLGADTIAGDPMCSFNMTPVGIGKCLKYILQWQLATLILGGG
GYNLANTARCWTYLTGVILGKTLSSEIPDHEFFTAYGPDYVLEIT
PSCRPDRNEPHRIQQILNYIKGNLKHVVGGGGSGKRPAATKKAGQ
AKKKKGS

[0220] In some embodiments, a site-specific disrupting agent comprises a targeting moiety (e.g., comprising dCas9, e.g., an S. aureus dCas9), a first effector moiety comprising G9A; e.g., a G9A domain, and a second effector moiety comprising EZH2, e.g., an EZH2 domain. In some embodiments, a site-specific disrupting agent comprises a targeting moiety comprising dCas9, e.g., an S. pyogenes dCas9, e.g., a mutant S. pyogenes Cas9, e.g., Cas9m4; a first effector moiety comprising G9A, e.g., a G9A domain; and a second effector moiety comprising EZH2, e.g., a EZH2 domain. In some embodiments, the site-specific disrupting agent is encoded by the nucleic acid sequence of SEQ ID NO: 69 (e.g., mRNA encoding the site-specific disrupting agent). In some embodiments, a nucleic acid described herein comprises a nucleic acid sequence of SEQ ID NO: 69 or a sequence with at least 80, 85, 90, 95, 99, or 100% identity thereto, or having no more than 20, 19, 18, 17, 16, 15, 14, 13, 12, 11, 10, 9, 8, 7, 6, 5, 4, 3, 2, or 1 positions of difference thereto.

G9A-dCas9-EZH2 (MR-29441) mRNA sequence
(SEQ ID NO. 69)
AGGAAATAAGAGAGAAAAGAAGAGTAAGAAGAAATATAAGAGCCA
CCATGGCCCCCAAGAAGAAGCGGAAGGTGGGCATCCACGGCGTGC
CCGCCGCCTCGGGCGGGGGTGGCTCAGGAAGCGCCGCTATCGCCG
AAGTGCTGCTGAATGCCAGATGCGATCTGCATGCCGTGAACTACC
ACGGCGACACCCCTCTGCATATCGCCGCTAGAGAGAGCTACCATG
ACTGTGTGCTGCTGTTTCTGAGCAGAGGCGCCAATCCCGAGCTCA
GAAACAAAGAGGGCGACACCGCTTGGGATCTGACACCCGAGAGAT
CCGACGTGTGGTTCGCTCTGCAACTGAATAGAAAACTGAGACTGG
GCGTCGGCAATAGGGCCATTAGAACCGAGAAGATCATCTGTAGGG
ACGTGGCTAGGGGCTACGAGAACGTGCCCATCCCTTGTGTGAACG
GAGTGGATGGAGAGCCTTGCCCCGAGGATTACAAATACATCAGCG
AGAACTGCGAAACCTCCACCATGAATATCGATAGAAACATTACAC
ACCTCCAGCACTGTACATGCGTGGACGATTGCAGCAGCAGCAACT
GTCTGTGCGGCCAACTGAGCATCAGATGCTGGTACGACAAGGATG
GCAGACTGCTGCAAGAGTTCAACAAGATCGAACCCCCTCTGATCT
TCGAGTGTAACCAAGCTTGCAGCTGTTGGAGGAACTGCAAGAATA
GGGTCGTGCAGTCCGGAATCAAGGTGAGACTGCAGCTGTATAGAA
CAGCTAAGATGGGATGGGGAGTCAGAGCTCTGCAGACCATCCCCC
AAGGCACATTCATCTGTGAGTACGTCGGCGAACTCATCAGCGACG
CTGAGGCCGATGTGAGGGAGGACGACAGCTATCTCTTCGACCTCG
ACAACAAGGACGGCGAGGTGTACTGCATCGACGCTAGATATTACG
GCAACATCAGCAGATTCATCAACCACCTCTGCGACCCCAATATCA
TCCCCGTGAGAGTGTTCATGCTCCATCAAGATCTGAGATTCCCTA
GGATCGCCTTCTTCAGCTCTAGAGACATTAGAACCGGCGAGGAGC
TGGGATTCGACTACGGCGACAGGTTCTGGGACATCAAGAGCAAGT
ACTTCACATGCCAATGCGGCAGCGAGAAATGCAAGCATAGCGCCG
AGGCCATTGCTCTGGAGCAGTCTAGACTGGCTAGGCTGGACCCTC
ACCCCGAGCTGCTGCCCGAACTGGGATCTCTGCCTCCCGTGAATA
CCGGAGGTGGCGGATCGGGAGACAAGAAGTACAGCATCGGCCTGG
CCATCGGCACCAACAGCGTGGGCTGGGCCGTGATCACCGACGAGT
ACAAGGTGCCCAGCAAGAAGTTCAAGGTGCTGGGCAACACCGACC
GGCACAGCATCAAGAAGAACCTGATCGGCGCCCTGCTGTTCGACA
GCGGCGAGACCGCCGAGGCCACCCGGCTGAAGCGGACCGCCCGGC
GGCGGTACACCCGGCGGAAGAACCGGATCTGCTACCTGCAGGAGA
TCTTCAGCAACGAGATGGCCAAGGTGGACGACAGCTTCTTCCACC
GGCTGGAGGAGAGCTTCCTGGTGGAGGAGGACAAGAAGCACGAGC
GGCACCCCATCTTCGGCAACATCGTGGACGAGGTGGCCTACCACG
AGAAGTACCCCACCATCTACCACCTGCGGAAGAAGCTGGTGGACA
GCACCGACAAGGCCGACCTGCGGCTGATCTACCTGGCCCTGGCCC
ACATGATCAAGTTCCGGGGCCACTTCCTGATCGAGGGCGACCTGA
ACCCCGACAACAGCGACGTGGACAAGCTGTTCATCCAGCTGGTGC
AGACCTACAACCAGCTGTTCGAGGAGAACCCCATCAACGCCAGCG
GCGTGGACGCCAAGGCCATCCTGAGCGCCCGGCTGAGCAAGAGCC
GGCGGCTGGAGAACCTGATCGCCCAGCTGCCCGGCGAGAAGAAGA
ACGGCCTGTTCGGCAACCTGATCGCCCTGAGCCTGGGCCTGACCC
CCAACTTCAAGAGCAACTTCGACCTGGCCGAGGACGCCAAGCTGC
AGCTGAGCAAGGACACCTACGACGACGACCTGGACAACCTGCTGG
CCCAGATCGGCGACCAGTACGCCGACCTGTTCCTGGCCGCCAAGA
ACCTGAGCGACGCCATCCTGCTGAGCGACATCCTGCGGGTGAACA
CCGAGATCACCAAGGCCCCCCTGAGCGCCAGCATGATCAAGCGGT
ACGACGAGCACCACCAGGACCTGACCCTGCTGAAGGCCCTGGTGC
GGCAGCAGCTGCCCGAGAAGTACAAGGAGATCTTCTTCGACCAGA
GCAAGAACGGCTACGCCGGCTACATCGACGGCGGCGCCAGCCAGG
AGGAGTTCTACAAGTTCATCAAGCCCATCCTGGAGAAGATGGACG
GCACCGAGGAGCTGCTGGTGAAGCTGAACCGGGAGGACCTGCTGC
GGAAGCAGCGGACCTTCGACAACGGCAGCATCCCCCACCAGATCC
ACCTGGGCGAGCTGCACGCCATCCTGCGGCGGCAGGAGGACTTCT
ACCCCTTCCTGAAGGACAACCGGGAGAAGATCGAGAAGATCCTGA
CCTTCCGGATCCCCTACTACGTGGGCCCCCTGGCCCGGGGCAACA
GCCGGTTCGCCTGGATGACCCGGAAATCCGAGGAGACCATCACCC
CCTGGAACTTCGAGGAGGTGGTGGACAAGGGCGCCAGCGCCCAGA
GCTTCATCGAGCGGATGACCAACTTCGACAAGAACCTGCCCAACG
AGAAGGTGCTGCCCAAGCACAGCCTGCTGTACGAGTACTTCACCG
TGTACAACGAGCTGACCAAGGTGAAGTACGTGACCGAGGGCATGC
GGAAGCCCGCCTTCCTGAGCGGCGAGCAGAAGAAGGCCATCGTGG
ACCTGCTGTTCAAGACCAACCGGAAGGTGACCGTGAAGCAGCTGA
AGGAGGACTACTTCAAGAAGATCGAGTGCTTCGACAGCGTGGAGA
TCAGCGGCGTGGAGGACCGGTTCAACGCCAGCCTGGGCACCTACC
ACGACCTGCTGAAGATCATCAAGGACAAGGACTTCCTGGACAACG
AGGAGAACGAGGACATCCTGGAGGACATCGTGCTGACCCTGACCC
TGTTCGAGGACCGGGAGATGATCGAGGAGCGGCTGAAAACCTACG
CCCACCTGTTCGACGACAAGGTGATGAAGCAGCTGAAGCGGCGGC
GGTACACCGGCTGGGGCCGGCTGAGCCGGAAGCTGATCAACGGCA
TCCGGGACAAGCAGAGCGGCAAGACCATCCTGGACTTCCTGAAAT
CCGACGGCTTCGCCAACCGGAACTTCATGCAGCTGATCCACGACG
ACAGCCTGACCTTCAAGGAGGACATCCAGAAGGCCCAGGTGAGCG
GCCAGGGCGACAGCCTGCACGAGCACATCGCCAACCTGGCCGGCA
GCCCCGCCATCAAGAAGGGCATCCTGCAGACCGTGAAGGTGGTGG
ACGAGCTGGTGAAGGTGATGGGCCGGCACAAGCCCGAGAACATCG
TGATCGAGATGGCCCGGGAGAACCAGACCACCCAGAAGGGCCAGA
AGAACAGCCGGGAGCGGATGAAGCGGATCGAGGAGGGCATCAAGG
AGCTGGGCAGCCAGATCCTGAAGGAGCACCCCGTGGAGAACACCC
AGCTGCAGAACGAGAAGCTGTACCTGTACTACCTGCAGAACGGCC
GGGACATGTACGTGGACCAGGAGCTGGACATCAACCGGCTGAGCG
ACTACGACGTGGCCGCCATCGTGCCCCAGAGCTTCCTGAAGGACG
ACAGCATCGACAACAAGGTGCTGACCCGGAGCGACAAGGCCCGGG
GCAAGAGCGACAACGTGCCCAGCGAGGAGGTGGTGAAGAAGATGA
AGAACTACTGGCGGCAGCTGCTGAACGCCAAGCTGATCACCCAGC
GGAAGTTCGACAACCTGACCAAGGCCGAGCGGGGCGGCCTGAGCG
AGCTGGACAAGGCCGGCTTCATCAAGCGGCAGCTGGTGGAGACCC
GGCAGATCACCAAGCACGTGGCCCAGATCCTGGACAGCCGGATGA
ACACCAAGTACGACGAGAACGACAAGCTGATCCGGGAGGTGAAGG
TGATCACCCTGAAATCCAAGCTGGTGAGCGACTTCCGGAAGGACT
TCCAGTTCTACAAGGTGCGGGAGATCAACAACTACCACCACGCCC
ACGACGCCTACCTGAACGCCGTGGTGGGCACCGCCCTGATCAAGA
AGTACCCCAAGCTGGAGAGCGAGTTCGTGTACGGCGACTACAAGG
TGTACGACGTGCGGAAGATGATCGCCAAGAGCGAGCAGGAGATCG
GCAAGGCCACCGCCAAGTACTTCTTCTACAGCAACATCATGAACT
TCTTCAAGACCGAGATCACCCTGGCCAACGGCGAGATCCGGAAGC
GGCCCCTGATCGAGACCAACGGCGAGACCGGCGAGATCGTGTGGG
ACAAGGGCCGGGACTTCGCCACCGTGCGGAAGGTGCTGAGCATGC
CCCAGGTGAACATCGTGAAGAAAACCGAGGTGCAGACCGGCGGCT
TCAGCAAGGAGAGCATCCTGCCCAAGCGGAACAGCGACAAGCTGA
TCGCCCGGAAGAAGGACTGGGACCCCAAGAAGTACGGCGGCTTCG
ACAGCCCCACCGTGGCCTACAGCGTGCTGGTGGTGGCCAAGGTGG
AGAAGGGCAAGAGCAAGAAGCTGAAATCCGTGAAGGAGCTGCTGG
GCATCACCATCATGGAGCGGAGCAGCTTCGAGAAGAACCCCATCG
ACTTCCTGGAGGCCAAGGGCTACAAGGAGGTGAAGAAGGACCTGA
TCATCAAGCTGCCCAAGTACAGCCTGTTCGAGCTGGAGAACGGCC
GGAAGCGGATGCTGGCCAGCGCCGGCGAGCTGCAGAAGGGCAACG
AGCTGGCCCTGCCCAGCAAGTACGTGAACTTCCTGTACCTGGCCA
GCCACTACGAGAAGCTGAAGGGCAGCCCCGAGGACAACGAGCAGA
AGCAGCTGTTCGTGGAGCAGCACAAGCACTACCTGGACGAGATCA
TCGAGCAGATCAGCGAGTTCAGCAAGCGGGTGATCCTGGCCGACG
CCAACCTGGACAAGGTGCTGAGCGCCTACAACAAGCACCGGGACA
AGCCCATCCGGGAGCAGGCCGAGAACATCATCCACCTGTTCACCC
TGACCAACCTGGGCGCCCCCGCCGCCTTCAAGTACTTCGACACCA
CCATCGACCGGAAGCGGTACACCAGCACCAAGGAGGTGCTGGACG
CCACCCTGATCCACCAGAGCATCACCGGCCTGTACGAGACCCGGA
TCGACCTGAGCCAGCTGGGCGGCGACAGCGGCGGCAAGCGGCCCG
CCGCCACCAAGAAGGCCGGCCAGGCCAAGAAGAAGAAGTCGGGCG
GGGGTGGCTCAGGACAGACCGGCAAAAAGTCCGAAAAGGGCCCCG
TGTGCTGGAGGAAGAGGGTCAAGAGCGAGTACATGAGGCTGAGAC
AGCTCAAGAGATTTAGGAGAGCCGATGAGGTGAAGTCCATGTTCT
CCAGCAACAGACAAAAGATTCTGGAGAGGACCGAGATCCTCAACC
AAGAGTGGAAGCAGAGAAGAATCCAGCCCGTGCACATTCTGACCT
CCGTGAGCTCTCTGAGGGGCACAAGAGAATGCTCCGTCACCAGCG
ATCTGGACTTCCCCACACAAGTGATCCCCCTCAAGACACTGAACG
CTGTGGCCAGCGTGCCCATCATGTATAGCTGGTCCCCTCTGCAAC
AGAACTTCATGGTGGAGGACGAGACAGTGCTGCACAATATCCCCT
ACATGGGAGATGAGGTGCTGGACCAAGACGGCACCTTTATTGAGG
AGCTGATTAAAAACTACGATGGCAAGGTGCACGGCGATAGGGAGT
GTGGCTTCATCAACGACGAGATCTTCGTCGAGCTGGTGAATGCTC
TGGGCCAGTATAATGACGATGATGACGACGATGACGGCGACGACC
CCGAAGAGAGAGAGGAGAAGCAAAAGGATCTGGAGGACCATAGGG
ACGACAAAGAGTCTAGACCTCCTAGAAAGTTCCCCTCCGACAAGA
TCTTCGAAGCCATCTCCTCCATGTTCCCCGACAAGGGCACAGCCG
AGGAACTGAAGGAGAAGTATAAGGAACTCACAGAGCAACAGCTGC
CCGGAGCTCTGCCTCCCGAGTGCACCCCTAACATCGACGGCCCCA
ACGCCAAGAGCGTGCAGAGGGAGCAATCCCTCCACAGCTTCCATA
CCCTCTTCTGCAGAAGATGCTTTAAATACGATTGCTTTCTCCATC
CTTTCCACGCCACACCCAACACCTACAAGAGGAAGAACACCGAAA
CCGCTCTGGACAATAAACCTTGCGGACCCCAGTGCTACCAGCATC
TGGAAGGAGCCAAGGAATTTGCCGCTGCTCTGACAGCCGAGAGAA
TTAAAACCCCTCCCAAAAGACCCGGCGGCAGAAGGAGGGGCAGAC
TGCCTAATAACAGCAGCAGACCCAGCACCCCTACCATTAACGTGC
TGGAATCCAAGGACACCGACAGCGATAGAGAGGCCGGCACAGAAA
CCGGCGGAGAGAACAACGACAAGGAGGAGGAGGAGAAGAAAGACG
AGACATCCTCCAGCAGCGAGGCTAATAGCAGATGCCAGACCCCTA
TCAAGATGAAACCTAATATCGAGCCCCCCGAGAATGTGGAGTGGA
GCGGCGCTGAGGCCTCCATGTTTAGAGTGCTGATCGGAACCTACT
ACGACAACTTCTGCGCTATCGCTAGACTGATTGGCACCAAGACAT
GCAGACAAGTGTACGAGTTCAGAGTCAAGGAGAGCTCCATTATCG
CCCCCGCCCCCGCCGAAGATGTGGACACCCCCCCCAGAAAGAAGA
AAAGGAAGCATAGACTGTGGGCCGCCCACTGTAGAAAGATCCAGC
TCAAAAAGGACGGCAGCAGCAACCACGTGTACAACTATCAGCCTT
GTGACCACCCCAGACAACCTTGTGATTCCAGCTGCCCTTGCGTGA
TCGCCCAGAACTTCTGCGAGAAGTTCTGTCAGTGCAGCAGCGAGT
GCCAAAATAGATTTCCCGGATGTAGGTGCAAAGCCCAGTGCAATA
CCAAGCAGTGCCCTTGCTATCTGGCCGTGAGAGAGTGCGATCCCG
ATCTGTGTCTGACATGTGGAGCTGCCGACCATTGGGACAGCAAGA
ATGTGAGCTGCAAGAACTGCAGCATCCAAAGGGGAAGCAAAAAAC
ATCTGCTGCTCGCCCCTTCCGATGTGGCCGGATGGGGAATCTTTA
TCAAGGACCCCGTCCAGAAAAACGAGTTCATTTCCGAGTATTGCG
GCGAGATCATCAGCCAAGACGAAGCTGATAGAAGAGGCAAAGTGT
ATGACAAATACATGTGCTCCTTCCTCTTCAACCTCAATAATGATT
TCGTGGTGGACGCCACAAGGAAGGGCAACAAGATTAGATTCGCCA
ACCACAGCGTCAATCCTAACTGCTATGCCAAGGTCATGATGGTCA
ACGGCGACCACAGAATTGGCATCTTCGCTAAGAGGGCCATCCAGA
CCGGCGAGGAACTGTTCTTCGACTATAGATACTCCCAAGCCGACG
CTCTGAAGTACGTGGGCATCGAGAGAGAGATGGAAATCCCCGGAG
GTGGCGGATCGGGAAAGCGGCCCGCCGCCACCAAGAAGGCCGGTC
AGGCCAAGAAGAAGAAGGGCAGCTACCCCTACGACGTGCCCGACT
ACGCCTGAGCGGCCGCTTAATTAAGCTGCCTTCTGCGGGGCTTGC
CTTCTGGCCATGCCCTTCTTCTCTCCCTTGCACCTGTACCTCTTG
GTCTTTGAATAAAGCCTGAGTAGGAAGTCTAGAAAAAAAAAAAAA
AAAAAAAAAAAAAAAAAAAAAAAAAAAAAAAAAAAAAAAAAAAAA
AAAAAAAAAAAAAAAAAAAAAA

[0221] In some embodiments, a site-specific disrupting agent comprises the amino acid sequence of SEQ ID NOs: 70 or 80. In some embodiments, a site-specific disrupting agent described herein comprises an amino acid sequence of SEQ ID NO: 70 or 80 or a sequence with at least 80, 85, 90, 95, 99, or 100% identity thereto, or having no more than 20, 19, 18, 17, 16, 15, 14, 13, 12, 11, 10, 9, 8, 7, 6, 5, 4, 3, 2, or 1 positions of difference thereto.

G9A-dCas9-EZH2 protein
(SEQ ID NO. 70)
MAPKKKRKVGIHGVPAASGGGGSGSAAIAEVLLNARCDLHAVNYH
GDTPLHIAARESYHDCVLLFLSRGANPELRNKEGDTAWDLTPERS
DVWFALQLNRKLRLGVGNRAIRTEKIICRDVARGYENVPIPCVNG
VDGEPCPEDYKYISENCETSTMNIDRNITHLQHCTCVDDCSSSNC
LCGQLSIRCWYDKDGRLLQEFNKIEPPLIFECNQACSCWRNCKNR
VVQSGIKVRLQLYRTAKMGWGVRALQTIPQGTFICEYVGELISDA
EADVREDDSYLFDLDNKDGEVYCIDARYYGNISRFINHLCDPNII
PVRVFMLHQDLRFPRIAFFSSRDIRTGEELGFDYGDRFWDIKSKY
FTCQCGSEKCKHSAEAIALEQSRLARLDPHPELLPELGSLPPVNT
GGGGSGDKKYSIGLAIGTNSVGWAVITDEYKVPSKKFKVLGNTDR
HSIKKNLIGALLFDSGETAEATRLKRTARRRYTRRKNRICYLQEI
FSNEMAKVDDSFFHRLEESFLVEEDKKHERHPIFGNIVDEVAYHE
KYPTIYHLRKKLVDSTDKADLRLIYLALAHMIKFRGHFLIEGDLN
PDNSDVDKLFIQLVQTYNQLFEENPINASGVDAKAILSARLSKSR
RLENLIAQLPGEKKNGLFGNLIALSLGLTPNFKSNFDLAEDAKLQ
LSKDTYDDDLDNLLAQIGDQYADLFLAAKNLSDAILLSDILRVNT
EITKAPLSASMIKRYDEHHQDLTLLKALVRQQLPEKYKEIFFDQS
KNGYAGYIDGGASQEEFYKFIKPILEKMDGTEELLVKLNREDLLR
KQRTFDNGSIPHQIHLGELHAILRRQEDFYPFLKDNREKIEKILT
FRIPYYVGPLARGNSRFAWMTRKSEETITPWNFEEVVDKGASAQS
FIERMTNFDKNLPNEKVLPKHSLLYEYFTVYNELTKVKYVTEGMR
KPAFLSGEQKKAIVDLLFKTNRKVTVKQLKEDYFKKIECFDSVEI
SGVEDRFNASLGTYHDLLKIIKDKDFLDNEENEDILEDIVLTLTL
FEDREMIEERLKTYAHLFDDKVMKQLKRRRYTGWGRLSRKLINGI
RDKQSGKTILDFLKSDGFANRNFMQLIHDDSLTFKEDIQKAQVSG
QGDSLHEHIANLAGSPAIKKGILQTVKVVDELVKVMGRHKPENIV
IEMARENQTTQKGQKNSRERMKRIEEGIKELGSQILKEHPVENTQ
LQNEKLYLYYLQNGRDMYVDQELDINRLSDYDVAAIVPQSFLKDD
SIDNKVLTRSDKARGKSDNVPSEEVVKKMKNYWRQLLNAKLITQR
KFDNLTKAERGGLSELDKAGFIKRQLVETRQITKHVAQILDSRMN
TKYDENDKLIREVKVITLKSKLVSDFRKDFQFYKVREINNYHHAH
DAYLNAVVGTALIKKYPKLESEFVYGDYKVYDVRKMIAKSEQEIG
KATAKYFFYSNIMNFFKTEITLANGEIRKRPLIETNGETGEIVWD
KGRDFATVRKVLSMPQVNIVKKTEVQTGGFSKESILPKRNSDKLI
ARKKDWDPKKYGGFDSPTVAYSVLVVAKVEKGKSKKLKSVKELLG
ITIMERSSFEKNPIDFLEAKGYKEVKKDLIIKLPKYSLFELENGR
KRMLASAGELQKGNELALPSKYVNFLYLASHYEKLKGSPEDNEQK
QLFVEQHKHYLDEIIEQISEFSKRVILADANLDKVLSAYNKHRDK
PIREQAENIIHLFTLTNLGAPAAFKYFDTTIDRKRYTSTKEVLDA
TLIHQSITGLYETRIDLSQLGGDSGGKRPAATKKAGQAKKKKSGG
GGSGQTGKKSEKGPVCWRKRVKSEYMRLRQLKRFRRADEVKSMFS
SNRQKILERTEILNQEWKQRRIQPVHILTSVSSLRGTRECSVTSD
LDFPTQVIPLKTLNAVASVPIMYSWSPLQQNFMVEDETVLHNIPY
MGDEVLDQDGTFIEELIKNYDGKVHGDRECGFINDEIFVELVNAL
GQYNDDDDDDDGDDPEEREEKQKDLEDHRDDKESRPPRKFPSDKI
FEAISSMFPDKGTAEELKEKYKELTEQQLPGALPPECTPNIDGPN
AKSVQREQSLHSFHTLFCRRCFKYDCFLHPFHATPNTYKRKNTET
ALDNKPCGPQCYQHLEGAKEFAAALTAERIKTPPKRPGGRRRGRL
PNNSSRPSTPTINVLESKDTDSDREAGTETGGENNDKEEEEKKDE
TSSSSEANSRCQTPIKMKPNIEPPENVEWSGAEASMFRVLIGTYY
DNFCAIARLIGTKTCRQVYEFRVKESSIIAPAPAEDVDTPPRKKK
RKHRLWAAHCRKIQLKKDGSSNHVYNYQPCDHPRQPCDSSCPCVI
AQNFCEKFCQCSSECQNRFPGCRCKAQCNTKQCPCYLAVRECDPD
LCLTCGAADHWDSKNVSCKNCSIQRGSKKHLLLAPSDVAGWGIFI
KDPVQKNEFISEYCGEIISQDEADRRGKVYDKYMCSFLFNLNNDF
VVDATRKGNKIRFANHSVNPNCYAKVMMVNGDHRIGIFAKRAIQT
GEELFFDYRYSQADALKYVGIEREMEIPGGGGSGKRPAATKKAGQ
AKKKKGSYPYDVPDYA
G9A-dCas9-EZH2 protein without HA tag
(SEQ ID NO. 80)
MAPKKKRKVGIHGVPAASGGGGSGSAAIAEVLLNARCDLHAVNYH
GDTPLHIAARESYHDCVLLFLSRGANPELRNKEGDTAWDLTPERS
DVWFALQLNRKLRLGVGNRAIRTEKIICRDVARGYENVPIPCVNG
VDGEPCPEDYKYISENCETSTMNIDRNITHLQHCTCVDDCSSSNC
LCGQLSIRCWYDKDGRLLQEFNKIEPPLIFECNQACSCWRNCKNR
VVQSGIKVRLQLYRTAKMGWGVRALQTIPQGTFICEYVGELISDA
EADVREDDSYLFDLDNKDGEVYCIDARYYGNISRFINHLCDPNII
PVRVFMLHQDLRFPRIAFFSSRDIRTGEELGFDYGDRFWDIKSKY
FTCQCGSEKCKHSAEAIALEQSRLARLDPHPELLPELGSLPPVNT
GGGGSGDKKYSIGLAIGTNSVGWAVITDEYKVPSKKFKVLGNTDR
HSIKKNLIGALLFDSGETAEATRLKRTARRRYTRRKNRICYLQEI
FSNEMAKVDDSFFHRLEESFLVEEDKKHERHPIFGNIVDEVAYHE
KYPTIYHLRKKLVDSTDKADLRLIYLALAHMIKFRGHFLIEGDLN
PDNSDVDKLFIQLVQTYNQLFEENPINASGVDAKAILSARLSKSR
RLENLIAQLPGEKKNGLFGNLIALSLGLTPNFKSNFDLAEDAKLQ
LSKDTYDDDLDNLLAQIGDQYADLFLAAKNLSDAILLSDILRVNT
EITKAPLSASMIKRYDEHHQDLTLLKALVRQQLPEKYKEIFFDQS
KNGYAGYIDGGASQEEFYKFIKPILEKMDGTEELLVKLNREDLLR
KQRTFDNGSIPHQIHLGELHAILRRQEDFYPFLKDNREKIEKILT
FRIPYYVGPLARGNSRFAWMTRKSEETITPWNFEEVVDKGASAQS
FIERMTNFDKNLPNEKVLPKHSLLYEYFTVYNELTKVKYVTEGMR
KPAFLSGEQKKAIVDLLFKTNRKVTVKQLKEDYFKKIECFDSVEI
SGVEDRFNASLGTYHDLLKIIKDKDFLDNEENEDILEDIVLTLTL
FEDREMIEERLKTYAHLFDDKVMKQLKRRRYTGWGRLSRKLINGI
RDKQSGKTILDFLKSDGFANRNFMQLIHDDSLTFKEDIQKAQVSG
QGDSLHEHIANLAGSPAIKKGILQTVKVVDELVKVMGRHKPENIV
IEMARENQTTQKGQKNSRERMKRIEEGIKELGSQILKEHPVENTQ
LQNEKLYLYYLQNGRDMYVDQELDINRLSDYDVAAIVPQSFLKDD
SIDNKVLTRSDKARGKSDNVPSEEVVKKMKNYWRQLLNAKLITQR
KFDNLTKAERGGLSELDKAGFIKRQLVETRQITKHVAQILDSRMN
TKYDENDKLIREVKVITLKSKLVSDFRKDFQFYKVREINNYHHAH
DAYLNAVVGTALIKKYPKLESEFVYGDYKVYDVRKMIAKSEQEIG
KATAKYFFYSNIMNFFKTEITLANGEIRKRPLIETNGETGEIVWD
KGRDFATVRKVLSMPQVNIVKKTEVQTGGFSKESILPKRNSDKLI
ARKKDWDPKKYGGFDSPTVAYSVLVVAKVEKGKSKKLKSVKELLG
ITIMERSSFEKNPIDFLEAKGYKEVKKDLIIKLPKYSLFELENGR
KRMLASAGELQKGNELALPSKYVNFLYLASHYEKLKGSPEDNEQK
QLFVEQHKHYLDEIIEQISEFSDATLIHQSITGLYETRIDLSQLG
GDSGGKRPAATKKAGQAKKKKSGGGGSGQTGKKSEKGPVCWRKRV
KSEYMRLRQLKRFRRADEVKSMFSSNRQKILERTEILNQEWKQRR
IQPVHILTSVSSLRGTRECSVTSDLDFPTQVIPLKTLNAVASVPI
MYSWSPLQQNFMVEDETVLHNIPYMGDEVLDQDGTFIEELIKNYD
GKVHGDRECGFINDEIFVELVNALGQYNDDDDDDDGDDPEEREEK
QKDLEDHRDDKESRPPRKFPSDKIFEAISSMFPDKGTAEELKEKY
KELTEQQLPGALPPECTPNIDGPNAKSVQREQSLHSFHTLFCRRC
FKYDCFLHPFHATPNTYKRKNTETALDNKPCGPQCYQHLEGAKEF
AAALTAERIKTPPKRPGGRRRGRLPNNSSRPSTPTINVLESKDTD
SDREAGTETGGENNDKEEEEKKDETSSSSEANSRCQTPIKMKPNI
EPPENVEWSGAEASMFRVLIGTYYDNFCAIARLIGTKTCRQVYEF
RVKESSIIAPAPAEDVDTPPRKKKRKHRLWAAHCRKIQLKKDGSS
NHVYNYQPCDHPRQPCDSSCPCVIAQNFCEKFCQCSSECQNRFPG
CRCKAQCNTKQCPCYLAVRECDPDLCLTCGAADHWDSKNVSCKNC
SIQRGSKKHLLLAPSDVAGWGIFIKDPVQKNEFISEYCGEIISQD
EADRRGKVYDKYMCSFLFNLNNDFVVDATRKGNKIRFANHSVNPN
CYAKVMMVNGDHRIGIFAKRAIQTGEELFFDYRYSQADALKYVGI
EREMEIPGGGGSGKRPAATKKAGQAKKKKGS

[0222] In some embodiments, a site-specific disrupting agent comprises a targeting moiety (e.g., comprising dCas9, e.g., an S. aureus dCas9), a first effector moiety comprising G9A; e.g., a G9A domain, and a second effector moiety comprising KRAB, e.g., a KRAB domain. In some embodiments, a site-specific disrupting agent comprises a targeting moiety comprising dCas9, e.g., an S. pyogenes dCas9, e.g., a mutant S. pyogenes Cas9, e.g., Cas9m4; a first effector moiety comprising G9A, e.g., a G9A domain; and a second effector moiety comprising KRAB, e.g., a KRAB domain. In some embodiments, the site-specific disrupting agent is encoded by the nucleic acid sequence of SEQ ID NO: 71 (e.g., mRNA encoding the site-specific disrupting agent). In some embodiments, a nucleic acid described herein comprises a nucleic acid sequence of SEQ ID NO: 71 or a sequence with at least 80, 85, 90, 95, 99, or 100% identity thereto, or having no more than 20, 19, 18, 17, 16, 15, 14, 13, 12, 11, 10, 9, 8, 7, 6, 5, 4, 3, 2, or 1 positions of difference thereto.

G9A-dCas9-KRAB (MR-29942) mRNA sequence
(SEQ ID NO. 71)
AGGAAATAAGAGAGAAAAGAAGAGTAAGAAGAAATATAAGAGCCA
CCATGGCCCCCAAGAAGAAGCGGAAGGTGGGCATCCACGGCGTGC
CCGCCGCCTCGGGCGGGGGTGGCTCAGGAAGCGCCGCTATCGCCG
AAGTGCTGCTGAATGCCAGATGCGATCTGCATGCCGTGAACTACC
ACGGCGACACCCCTCTGCATATCGCCGCTAGAGAGAGCTACCATG
ACTGTGTGCTGCTGTTTCTGAGCAGAGGCGCCAATCCCGAGCTCA
GAAACAAAGAGGGCGACACCGCTTGGGATCTGACACCCGAGAGAT
CCGACGTGTGGTTCGCTCTGCAACTGAATAGAAAACTGAGACTGG
GCGTCGGCAATAGGGCCATTAGAACCGAGAAGATCATCTGTAGGG
ACGTGGCTAGGGGCTACGAGAACGTGCCCATCCCTTGTGTGAACG
GAGTGGATGGAGAGCCTTGCCCCGAGGATTACAAATACATCAGCG
AGAACTGCGAAACCTCCACCATGAATATCGATAGAAACATTACAC
ACCTCCAGCACTGTACATGCGTGGACGATTGCAGCAGCAGCAACT
GTCTGTGCGGCCAACTGAGCATCAGATGCTGGTACGACAAGGATG
GCAGACTGCTGCAAGAGTTCAACAAGATCGAACCCCCTCTGATCT
TCGAGTGTAACCAAGCTTGCAGCTGTTGGAGGAACTGCAAGAATA
GGGTCGTGCAGTCCGGAATCAAGGTGAGACTGCAGCTGTATAGAA
CAGCTAAGATGGGATGGGGAGTCAGAGCTCTGCAGACCATCCCCC
AAGGCACATTCATCTGTGAGTACGTCGGCGAACTCATCAGCGACG
CTGAGGCCGATGTGAGGGAGGACGACAGCTATCTCTTCGACCTCG
ACAACAAGGACGGCGAGGTGTACTGCATCGACGCTAGATATTACG
GCAACATCAGCAGATTCATCAACCACCTCTGCGACCCCAATATCA
TCCCCGTGAGAGTGTTCATGCTCCATCAAGATCTGAGATTCCCTA
GGATCGCCTTCTTCAGCTCTAGAGACATTAGAACCGGCGAGGAGC
TGGGATTCGACTACGGCGACAGGTTCTGGGACATCAAGAGCAAGT
ACTTCACATGCCAATGCGGCAGCGAGAAATGCAAGCATAGCGCCG
AGGCCATTGCTCTGGAGCAGTCTAGACTGGCTAGGCTGGACCCTC
ACCCCGAGCTGCTGCCCGAACTGGGATCTCTGCCTCCCGTGAATA
CCGGAGGTGGCGGATCGGGAGACAAGAAGTACAGCATCGGCCTGG
CCATCGGCACCAACAGCGTGGGCTGGGCCGTGATCACCGACGAGT
ACAAGGTGCCCAGCAAGAAGTTCAAGGTGCTGGGCAACACCGACC
GGCACAGCATCAAGAAGAACCTGATCGGCGCCCTGCTGTTCGACA
GCGGCGAGACCGCCGAGGCCACCCGGCTGAAGCGGACCGCCCGGC
GGCGGTACACCCGGCGGAAGAACCGGATCTGCTACCTGCAGGAGA
TCTTCAGCAACGAGATGGCCAAGGTGGACGACAGCTTCTTCCACC
GGCTGGAGGAGAGCTTCCTGGTGGAGGAGGACAAGAAGCACGAGC
GGCACCCCATCTTCGGCAACATCGTGGACGAGGTGGCCTACCACG
AGAAGTACCCCACCATCTACCACCTGCGGAAGAAGCTGGTGGACA
GCACCGACAAGGCCGACCTGCGGCTGATCTACCTGGCCCTGGCCC
ACATGATCAAGTTCCGGGGCCACTTCCTGATCGAGGGCGACCTGA
ACCCCGACAACAGCGACGTGGACAAGCTGTTCATCCAGCTGGTGC
AGACCTACAACCAGCTGTTCGAGGAGAACCCCATCAACGCCAGCG
GCGTGGACGCCAAGGCCATCCTGAGCGCCCGGCTGAGCAAGAGCC
GGCGGCTGGAGAACCTGATCGCCCAGCTGCCCGGCGAGAAGAAGA
ACGGCCTGTTCGGCAACCTGATCGCCCTGAGCCTGGGCCTGACCC
CCAACTTCAAGAGCAACTTCGACCTGGCCGAGGACGCCAAGCTGC
AGCTGAGCAAGGACACCTACGACGACGACCTGGACAACCTGCTGG
CCCAGATCGGCGACCAGTACGCCGACCTGTTCCTGGCCGCCAAGA
ACCTGAGCGACGCCATCCTGCTGAGCGACATCCTGCGGGTGAACA
CCGAGATCACCAAGGCCCCCCTGAGCGCCAGCATGATCAAGCGGT
ACGACGAGCACCACCAGGACCTGACCCTGCTGAAGGCCCTGGTGC
GGCAGCAGCTGCCCGAGAAGTACAAGGAGATCTTCTTCGACCAGA
GCAAGAACGGCTACGCCGGCTACATCGACGGCGGCGCCAGCCAGG
AGGAGTTCTACAAGTTCATCAAGCCCATCCTGGAGAAGATGGACG
GCACCGAGGAGCTGCTGGTGAAGCTGAACCGGGAGGACCTGCTGC
GGAAGCAGCGGACCTTCGACAACGGCAGCATCCCCCACCAGATCC
ACCTGGGCGAGCTGCACGCCATCCTGCGGCGGCAGGAGGACTTCT
ACCCCTTCCTGAAGGACAACCGGGAGAAGATCGAGAAGATCCTGA
CCTTCCGGATCCCCTACTACGTGGGCCCCCTGGCCCGGGGCAACA
GCCGGTTCGCCTGGATGACCCGGAAATCCGAGGAGACCATCACCC
CCTGGAACTTCGAGGAGGTGGTGGACAAGGGCGCCAGCGCCCAGA
GCTTCATCGAGCGGATGACCAACTTCGACAAGAACCTGCCCAACG
AGAAGGTGCTGCCCAAGCACAGCCTGCTGTACGAGTACTTCACCG
TGTACAACGAGCTGACCAAGGTGAAGTACGTGACCGAGGGCATGC
GGAAGCCCGCCTTCCTGAGCGGCGAGCAGAAGAAGGCCATCGTGG
ACCTGCTGTTCAAGACCAACCGGAAGGTGACCGTGAAGCAGCTGA
AGGAGGACTACTTCAAGAAGATCGAGTGCTTCGACAGCGTGGAGA
TCAGCGGCGTGGAGGACCGGTTCAACGCCAGCCTGGGCACCTACC
ACGACCTGCTGAAGATCATCAAGGACAAGGACTTCCTGGACAACG
AGGAGAACGAGGACATCCTGGAGGACATCGTGCTGACCCTGACCC
TGTTCGAGGACCGGGAGATGATCGAGGAGCGGCTGAAAACCTACG
CCCACCTGTTCGACGACAAGGTGATGAAGCAGCTGAAGCGGCGGC
GGTACACCGGCTGGGGCCGGCTGAGCCGGAAGCTGATCAACGGCA
TCCGGGACAAGCAGAGCGGCAAGACCATCCTGGACTTCCTGAAAT
CCGACGGCTTCGCCAACCGGAACTTCATGCAGCTGATCCACGACG
ACAGCCTGACCTTCAAGGAGGACATCCAGAAGGCCCAGGTGAGCG
GCCAGGGCGACAGCCTGCACGAGCACATCGCCAACCTGGCCGGCA
GCCCCGCCATCAAGAAGGGCATCCTGCAGACCGTGAAGGTGGTGG
ACGAGCTGGTGAAGGTGATGGGCCGGCACAAGCCCGAGAACATCG
TGATCGAGATGGCCCGGGAGAACCAGACCACCCAGAAGGGCCAGA
AGAACAGCCGGGAGCGGATGAAGCGGATCGAGGAGGGCATCAAGG
AGCTGGGCAGCCAGATCCTGAAGGAGCACCCCGTGGAGAACACCC
AGCTGCAGAACGAGAAGCTGTACCTGTACTACCTGCAGAACGGCC
GGGACATGTACGTGGACCAGGAGCTGGACATCAACCGGCTGAGCG
ACTACGACGTGGCCGCCATCGTGCCCCAGAGCTTCCTGAAGGACG
ACAGCATCGACAACAAGGTGCTGACCCGGAGCGACAAGGCCCGGG
GCAAGAGCGACAACGTGCCCAGCGAGGAGGTGGTGAAGAAGATGA
AGAACTACTGGCGGCAGCTGCTGAACGCCAAGCTGATCACCCAGC
GGAAGTTCGACAACCTGACCAAGGCCGAGCGGGGCGGCCTGAGCG
AGCTGGACAAGGCCGGCTTCATCAAGCGGCAGCTGGTGGAGACCC
GGCAGATCACCAAGCACGTGGCCCAGATCCTGGACAGCCGGATGA
ACACCAAGTACGACGAGAACGACAAGCTGATCCGGGAGGTGAAGG
TGATCACCCTGAAATCCAAGCTGGTGAGCGACTTCCGGAAGGACT
TCCAGTTCTACAAGGTGCGGGAGATCAACAACTACCACCACGCCC
ACGACGCCTACCTGAACGCCGTGGTGGGCACCGCCCTGATCAAGA
AGTACCCCAAGCTGGAGAGCGAGTTCGTGTACGGCGACTACAAGG
TGTACGACGTGCGGAAGATGATCGCCAAGAGCGAGCAGGAGATCG
GCAAGGCCACCGCCAAGTACTTCTTCTACAGCAACATCATGAACT
TCTTCAAGACCGAGATCACCCTGGCCAACGGCGAGATCCGGAAGC
GGCCCCTGATCGAGACCAACGGCGAGACCGGCGAGATCGTGTGGG
ACAAGGGCCGGGACTTCGCCACCGTGCGGAAGGTGCTGAGCATGC
CCCAGGTGAACATCGTGAAGAAAACCGAGGTGCAGACCGGCGGCT
TCAGCAAGGAGAGCATCCTGCCCAAGCGGAACAGCGACAAGCTGA
TCGCCCGGAAGAAGGACTGGGACCCCAAGAAGTACGGCGGCTTCG
ACAGCCCCACCGTGGCCTACAGCGTGCTGGTGGTGGCCAAGGTGG
AGAAGGGCAAGAGCAAGAAGCTGAAATCCGTGAAGGAGCTGCTGG
GCATCACCATCATGGAGCGGAGCAGCTTCGAGAAGAACCCCATCG
ACTTCCTGGAGGCCAAGGGCTACAAGGAGGTGAAGAAGGACCTGA
TCATCAAGCTGCCCAAGTACAGCCTGTTCGAGCTGGAGAACGGCC
GGAAGCGGATGCTGGCCAGCGCCGGCGAGCTGCAGAAGGGCAACG
AGCTGGCCCTGCCCAGCAAGTACGTGAACTTCCTGTACCTGGCCA
GCCACTACGAGAAGCTGAAGGGCAGCCCCGAGGACAACGAGCAGA
AGCAGCTGTTCGTGGAGCAGCACAAGCACTACCTGGACGAGATCA
TCGAGCAGATCAGCGAGTTCAGCAAGCGGGTGATCCTGGCCGACG
CCAACCTGGACAAGGTGCTGAGCGCCTACAACAAGCACCGGGACA
AGCCCATCCGGGAGCAGGCCGAGAACATCATCCACCTGTTCACCC
TGACCAACCTGGGCGCCCCCGCCGCCTTCAAGTACTTCGACACCA
CCATCGACCGGAAGCGGTACACCAGCACCAAGGAGGTGCTGGACG
CCACCCTGATCCACCAGAGCATCACCGGCCTGTACGAGACCCGGA
TCGACCTGAGCCAGCTGGGCGGCGACAGCGGCGGCAAGCGGCCCG
CCGCCACCAAGAAGGCCGGCCAGGCCAAGAAGAAGAAGTCGGGCG
GGGGTGGCTCAGACGCTAAGTCTCTGACCGCTTGGAGCAGAACAC
TGGTCACCTTCAAGGACGTGTTCGTCGACTTCACAAGAGAGGAGT
GGAAACTGCTGGACACCGCCCAGCAGATCCTCTATAGAAACGTCA
TGCTGGAGAACTACAAGAATCTGGTGTCTCTGGGCTACCAGCTGA
CCAAGCCCGACGTGATTCTGAGGCTGGAGAAGGGCGAGGAGCCTT
GGCTGGTGGAGAGAGAGATCCACCAAGAAACCCACCCCGACAGCG
AAACCGCCTTCGAGATCAAGAGCAGCGTGGGAGGTGGCGGATCGG
GAAAGCGGCCCGCCGCCACCAAGAAGGCCGGTCAGGCCAAGAAGA
AGAAGGGCAGCTACCCCTACGACGTGCCCGACTACGCCTGAGCGG
CCGCTTAATTAAGCTGCCTTCTGCGGGGCTTGCCTTCTGGCCATG
CCCTTCTTCTCTCCCTTGCACCTGTACCTCTTGGTCTTTGAATAA
AGCCTGAGTAGGAAGTCTAGAAAAAAAAAAAAAAAAAAAAAAAAA
AAAAAAAAAAAAAAAAAAAAAAAAAAAAAAAAAAAAAAAAAAAAA
AAAAAAAAAA

[0223] In some embodiments, a site-specific disrupting agent comprises the amino acid sequence of SEQ ID NOs: 72 or 81. In some embodiments, a site-specific disrupting agent described herein comprises an amino acid sequence of SEQ ID NO: 72 or 81 or a sequence with at least 80, 85, 90, 95, 99, or 100% identity thereto, or having no more than 20, 19, 18, 17, 16, 15, 14, 13, 12, 11, 10, 9, 8, 7, 6, 5, 4, 3, 2, or 1 positions of difference thereto.

G9A-dCas9-KRAB protein
(SEQ ID NO. 72)
MAPKKKRKVGIHGVPAASGGGGSGSAAIAEVLLNARCDLHAVNYH
GDTPLHIAARESYHDCVLLFLSRGANPELRNKEGDTAWDLTPERS
DVWFALQLNRKLRLGVGNRAIRTEKIICRDVARGYENVPIPCVNG
VDGEPCPEDYKYISENCETSTMNIDRNITHLQHCTCVDDCSSSNC
LCGQLSIRCWYDKDGRLLQEFNKIEPPLIFECNQACSCWRNCKNR
VVQSGIKVRLQLYRTAKMGWGVRALQTIPQGTFICEYVGELISDA
EADVREDDSYLFDLDNKDGEVYCIDARYYGNISRFINHLCDPNII
PVRVFMLHQDLRFPRIAFFSSRDIRTGEELGFDYGDRFWDIKSKY
FTCQCGSEKCKHSAEAIALEQSRLARLDPHPELLPELGSLPPVNT
GGGGSGDKKYSIGLAIGTNSVGWAVITDEYKVPSKKFKVLGNTDR
HSIKKNLIGALLFDSGETAEATRLKRTARRRYTRRKNRICYLQEI
FSNEMAKVDDSFFHRLEESFLVEEDKKHERHPIFGNIVDEVAYHE
KYPTIYHLRKKLVDSTDKADLRLIYLALAHMIKFRGHFLIEGDLN
PDNSDVDKLFIQLVQTYNQLFEENPINASGVDAKAILSARLSKSR
RLENLIAQLPGEKKNGLFGNLIALSLGLTPNFKSNFDLAEDAKLQ
LSKDTYDDDLDNLLAQIGDQYADLFLAAKNLSDAILLSDILRVNT
EITKAPLSASMIKRYDEHHQDLTLLKALVRQQLPEKYKEIFFDQS
KNGYAGYIDGGASQEEFYKFIKPILEKMDGTEELLVKLNREDLLR
KQRTFDNGSIPHQIHLGELHAILRRQEDFYPFLKDNREKIEKILT
FRIPYYVGPLARGNSRFAWMTRKSEETITPWNFEEVVDKGASAQS
FIERMTNFDKNLPNEKVLPKHSLLYEYFTVYNELTKVKYVTEGMR
KPAFLSGEQKKAIVDLLFKTNRKVTVKQLKEDYFKKIECFDSVEI
SGVEDRFNASLGTYHDLLKIIKDKDFLDNEENEDILEDIVLTLTL
FEDREMIEERLKTYAHLFDDKVMKQLKRRRYTGWGRLSRKLINGI
RDKQSGKTILDFLKSDGFANRNFMQLIHDDSLTFKEDIQKAQVSG
QGDSLHEHIANLAGSPAIKKGILQTVKVVDELVKVMGRHKPENIV
IEMARENQTTQKGQKNSRERMKRIEEGIKELGSQILKEHPVENTQ
LQNEKLYLYYLQNGRDMYVDQELDINRLSDYDVAAIVPQSFLKDD
SIDNKVLTRSDKARGKSDNVPSEEVVKKMKNYWRQLLNAKLITQR
KFDNLTKAERGGLSELDKAGFIKRQLVETRQITKHVAQILDSRMN
TKYDENDKLIREVKVITLKSKLVSDFRKDFQFYKVREINNYHHAH
DAYLNAVVGTALIKKYPKLESEFVYGDYKVYDVRKMIAKSEQEIG
KATAKYFFYSNIMNFFKTEITLANGEIRKRPLIETNGETGEIVWD
KGRDFATVRKVLSMPQVNIVKKTEVQTGGFSKESILPKRNSDKLI
ARKKDWDPKKYGGFDSPTVAYSVLVVAKVEKGKSKKLKSVKELLG
ITIMERSSFEKNPIDFLEAKGYKEVKKDLIIKLPKYSLFELENGR
KRMLASAGELQKGNELALPSKYVNFLYLASHYEKLKGSPEDNEQK
QLFVEQHKHYLDEIIEQISEFSDATLIHQSITGLYETRIDLSQLG
GDSGGKRPAATKKAGQAKKKKSGGGGSDAKSLTAWSRTLVTFKDV
FVDFTREEWKLLDTAQQILYRNVMLENYKNLVSLGYQLTKPDVIL
RLEKGEEPWLVEREIHQETHPDSETAFEIKSSVGGGGSGKRPAAT
KKAGQAKKKKGSYPYDVPDYA
G9A-dCas9-KRAB protein without HA tag
(SEQ ID NO. 81)
MAPKKKRKVGIHGVPAASGGGGSGSAAIAEVLLNARCDLHAVNYH
GDTPLHIAARESYHDCVLLFLSRGANPELRNKEGDTAWDLTPERS
DVWFALQLNRKLRLGVGNRAIRTEKIICRDVARGYENVPIPCVNG
VDGEPCPEDYKYISENCETSTMNIDRNITHLQHCTCVDDCSSSNC
LCGQLSIRCWYDKDGRLLQEFNKIEPPLIFECNQACSCWRNCKNR
VVQSGIKVRLQLYRTAKMGWGVRALQTIPQGTFICEYVGELISDA
EADVREDDSYLFDLDNKDGEVYCIDARYYGNISRFINHLCDPNII
PVRVFMLHQDLRFPRIAFFSSRDIRTGEELGFDYGDRFWDIKSKY
FTCQCGSEKCKHSAEAIALEQSRLARLDPHPELLPELGSLPPVNT
GGGGSGDKKYSIGLAIGTNSVGWAVITDEYKVPSKKFKVLGNTDR
HSIKKNLIGALLFDSGETAEATRLKRTARRRYTRRKNRICYLQEI
FSNEMAKVDDSFFHRLEESFLVEEDKKHERHPIFGNIVDEVAYHE
KYPTIYHLRKKLVDSTDKADLRLIYLALAHMIKFRGHFLIEGDLN
PDNSDVDKLFIQLVQTYNQLFEENPINASGVDAKAILSARLSKSR
RLENLIAQLPGEKKNGLFGNLIALSLGLTPNFKSNFDLAEDAKLQ
LSKDTYDDDLDNLLAQIGDQYADLFLAAKNLSDAILLSDILRVNT
EITKAPLSASMIKRYDEHHQDLTLLKALVRQQLPEKYKEIFFDQS
KNGYAGYIDGGASQEEFYKFIKPILEKMDGTEELLVKLNREDLLR
KQRTFDNGSIPHQIHLGELHAILRRQEDFYPFLKDNREKIEKILT
FRIPYYVGPLARGNSRFAWMTRKSEETITPWNFEEVVDKGASAQS
FIERMTNFDKNLPNEKVLPKHSLLYEYFTVYNELTKVKYVTEGMR
KPAFLSGEQKKAIVDLLFKTNRKVTVKQLKEDYFKKIECFDSVEI
SGVEDRFNASLGTYHDLLKIIKDKDFLDNEENEDILEDIVLTLTL
FEDREMIEERLKTYAHLFDDKVMKQLKRRRYTGWGRLSRKLINGI
RDKQSGKTILDFLKSDGFANRNFMQLIHDDSLTFKEDIQKAQVSG
QGDSLHEHIANLAGSPAIKKGILQTVKVVDELVKVMGRHKPENIV
IEMARENQTTQKGQKNSRERMKRIEEGIKELGSQILKEHPVENTQ
LQNEKLYLYYLQNGRDMYVDQELDINRLSDYDVAAIVPQSFLKDD
SIDNKVLTRSDKARGKSDNVPSEEVVKKMKNYWRQLLNAKLITQR
KFDNLTKAERGGLSELDKAGFIKRQLVETRQITKHVAQILDSRMN
TKYDENDKLIREVKVITLKSKLVSDFRKDFQFYKVREINNYHHAH
DAYLNAVVGTALIKKYPKLESEFVYGDYKVYDVRKMIAKSEQEIG
KATAKYFFYSNIMNFFKTEITLANGEIRKRPLIETNGETGEIVWD
KGRDFATVRKVLSMPQVNIVKKTEVQTGGFSKESILPKRNSDKLI
ARKKDWDPKKYGGFDSPTVAYSVLVVAKVEKGKSKKLKSVKELLG
ITIMERSSFEKNPIDFLEAKGYKEVKKDLIIKLPKYSLFELENGR
KRMLASAGELQKGNELALPSKYVNFLYLASHYEKLKGSPEDNEQK
QLFVEQHKHYLDEIIEQISEFSKRVILADANLDKVLSAYNKHRDK
PIREQAENIIHLFTLTNLGAPAAFKYFDTTIDRKRYTSTKEVLDA
TLIHQSITGLYETRIDLSQLGGDSGGKRPAATKKAGQAKKKKSGG
GGSDAKSLTAWSRTLVTFKDVFVDFTREEWKLLDTAQQILYRNVM
LENYKNLVSLGYQLTKPDVILRLEKGEEPWLVEREIHQETHPDSE
TAFEIKSSVGGGGSGKRPAATKKAGQAKKKKGS

[0224] In some embodiments, a site-specific disrupting agent comprises a targeting moiety (e.g., comprising dCas9, e.g., an S. aureus dCas9), a first effector moiety comprising EZH2; e.g., an EZH2 domain, and a second effector moiety comprising KRAB, e.g., a KRAB domain. In some embodiments, a site-specific disrupting agent comprises a targeting moiety comprising dCas9, e.g., an S. pyogenes dCas9, e.g., a mutant S. pyogenes Cas9, e.g., Cas9m4; a first effector moiety comprising EZH2, e.g., an EZH2 domain; and a second effector moiety comprising KRAB, e.g., a KRAB domain. In some embodiments, the site-specific disrupting agent is encoded by the nucleic acid sequence of SEQ ID NO: 85 (e.g., mRNA encoding the site-specific disrupting agent). In some embodiments, a nucleic acid described herein comprises a nucleic acid sequence of SEQ ID NO: 85 or a sequence with at least 80, 85, 90, 95, 99, or 100% identity thereto, or having no more than 20, 19, 18, 17, 16, 15, 14, 13, 12, 11, 10, 9, 8, 7, 6, 5, 4, 3, 2, or 1 positions of difference thereto.

EZH2-dCas9-KRAB (MR-29948) mRNA sequence
(SEQ ID NO. 85)
AGGAAATAAGAGAGAAAAGAAGAGTAAGAAGAAATATAAGAGCCA
CCATGGCCCCCAAGAAGAAGCGGAAGGTGGGCGGCAGCGGCGGCA
GCGGCCAGACCGGCAAGAAGAGCGAGAAGGGCCCCGTGTGCTGGC
GGAAGCGGGTGAAGAGCGAGTACATGCGGCTGCGGCAGCTGAAGC
GGTTCCGGCGGGCCGACGAGGTGAAGAGCATGTTCAGCAGCAACC
GGCAGAAGATCCTGGAGCGGACCGAGATCCTGAACCAGGAGTGGA
AGCAGCGGCGAATCCAGCCCGTGCACATCCTGACCAGCGTGAGCA
GCCTGCGGGGCACCCGGGAGTGCAGCGTGACCAGCGACCTGGACT
TCCCCACCCAGGTGATCCCCCTAAAGACCCTGAACGCCGTGGCCA
GCGTGCCCATCATGTACAGCTGGAGCCCCCTGCAGCAGAACTTCA
TGGTGGAGGACGAGACCGTGCTGCACAACATCCCCTACATGGGCG
ACGAGGTGCTGGACCAGGACGGCACCTTCATCGAGGAGCTGATCA
AGAACTACGACGGCAAGGTGCACGGCGACCGGGAGTGCGGCTTCA
TCAACGACGAGATCTTCGTGGAGCTGGTGAACGCCCTGGGCCAGT
ACAACGACGACGACGACGACGACGACGGCGACGACCCCGAGGAGC
GGGAGGAGAAGCAGAAGGACCTGGAGGACCACCGGGACGACAAGG
AGAGCCGGCCCCCCCGGAAGTTCCCCAGCGACAAGATCTTCGAGG
CCATCAGCAGCATGTTCCCCGACAAGGGCACCGCCGAGGAGCTGA
AGGAGAAGTACAAGGAGCTGACCGAGCAGCAGCTGCCCGGCGCCC
TGCCCCCCGAGTGCACCCCCAACATCGACGGCCCCAACGCCAAGA
GCGTGCAGCGGGAGCAGAGCCTGCACAGCTTCCACACCCTGTTCT
GCCGGCGGTGCTTCAAGTACGACTGCTTCCTGCACCCCTTCCACG
CCACCCCCAACACCTACAAGCGGAAGAACACCGAGACCGCCCTGG
ACAACAAGCCCTGCGGCCCCCAGTGCTACCAGCACCTGGAGGGCG
CCAAGGAGTTCGCCGCCGCCCTGACCGCCGAGCGGATCAAGACCC
CCCCCAAGCGGCCCGGCGGCCGGCGGCGGGGCCGGCTGCCCAACA
ACAGCAGCCGGCCCAGCACCCCCACCATCAACGTGCTGGAGAGCA
AGGACACCGACAGCGACCGGGAGGCCGGCACCGAGACCGGCGGCG
AGAACAACGACAAGGAGGAGGAGGAGAAGAAGGACGAGACCAGCA
GCAGCAGCGAGGCCAACAGCCGGTGCCAGACCCCCATCAAGATGA
AGCCCAACATCGAGCCCCCCGAGAACGTGGAGTGGAGCGGCGCCG
AGGCCAGCATGTTCCGGGTGCTGATCGGCACCTACTACGACAACT
TCTGCGCCATCGCCCGGCTGATCGGCACCAAGACCTGCCGGCAGG
TGTACGAGTTCCGGGTGAAGGAGAGCAGCATCATCGCCCCCGCCC
CCGCCGAGGACGTGGACACCCCCCCCCGGAAGAAGAAGCGGAAGC
ACCGGCTGTGGGCCGCCCACTGCCGGAAGATCCAGCTGAAGAAGG
ACGGCAGCAGCAACCACGTGTACAACTACCAGCCCTGCGACCACC
CCCGGCAGCCCTGCGACAGCAGCTGCCCCTGCGTGATCGCCCAGA
ACTTCTGCGAGAAGTTCTGCCAGTGCAGCAGCGAGTGCCAGAACC
GGTTCCCCGGCTGCCGGTGCAAGGCCCAGTGCAACACCAAGCAGT
GCCCCTGCTACCTGGCCGTGCGGGAGTGCGACCCCGACCTGTGCC
TGACCTGCGGCGCCGCCGACCACTGGGACAGCAAGAACGTGAGCT
GCAAGAACTGCAGCATCCAGCGGGGCAGCAAGAAGCACCTGCTGC
TGGCCCCCAGCGACGTGGCCGGCTGGGGCATCTTCATCAAGGACC
CCGTGCAGAAGAACGAGTTCATCAGCGAGTACTGCGGCGAGATCA
TCAGCCAGGACGAGGCCGACCGGCGGGGCAAGGTGTACGACAAGT
ACATGTGCAGCTTCCTGTTCAACCTGAACAACGACTTCGTGGTGG
ACGCCACCCGGAAGGGCAACAAGATCCGGTTCGCCAACCACAGCG
TGAACCCCAACTGCTACGCCAAGGTGATGATGGTGAACGGCGACC
ACCGGATCGGCATCTTCGCCAAGCGGGCCATCCAGACCGGCGAGG
AGCTGTTCTTCGACTACCGGTACAGCCAGGCCGACGCCCTGAAGT
ACGTGGGCATCGAGCGGGAGATGGAGATCCCCAGCACCGGCGGCA
GCGGCGGCAGCGGCGGCAGCGGCGGCAGCGGCGGCAGCGGCCGAC
CCGACAAGAAGTACAGCATCGGCCTGGCCATCGGCACCAACAGCG
TGGGCTGGGCCGTGATCACCGACGAGTACAAGGTGCCCAGCAAGA
AGTTCAAGGTGCTGGGCAACACCGACCGGCACAGCATCAAGAAGA
ACCTGATCGGCGCCCTGCTGTTCGACAGCGGCGAGACCGCCGAGG
CCACCCGGCTGAAGCGGACCGCCCGGCGGCGGTACACCCGGCGGA
AGAACCGGATCTGCTACCTGCAGGAGATCTTCAGCAACGAGATGG
CCAAGGTGGACGACAGCTTCTTCCACCGGCTGGAGGAGAGCTTCC
TGGTGGAGGAGGACAAGAAGCACGAGCGGCACCCCATCTTCGGCA
ACATCGTGGACGAGGTGGCCTACCACGAGAAGTACCCCACCATCT
ACCACCTGCGGAAGAAGCTGGTGGACAGCACCGACAAGGCCGACC
TGCGGCTGATCTACCTGGCCCTGGCCCACATGATCAAGTTCCGGG
GCCACTTCCTGATCGAGGGCGACCTGAACCCCGACAACAGCGACG
TGGACAAGCTGTTCATCCAGCTGGTGCAGACCTACAACCAGCTGT
TCGAGGAGAACCCCATCAACGCCAGCGGCGTGGACGCCAAGGCCA
TCCTGAGCGCCCGGCTGAGCAAGAGCCGGCGGCTGGAGAACCTGA
TCGCCCAGCTGCCCGGCGAGAAGAAGAACGGCCTGTTCGGCAACC
TGATCGCCCTGAGCCTGGGCCTGACCCCCAACTTCAAGAGCAACT
TCGACCTGGCCGAGGACGCCAAGCTGCAGCTGAGCAAGGACACCT
ACGACGACGACCTGGACAACCTGCTGGCCCAGATCGGCGACCAGT
ACGCCGACCTGTTCCTGGCCGCCAAGAACCTGAGCGACGCCATCC
TGCTGAGCGACATCCTGCGGGTGAACACCGAGATCACCAAGGCCC
CCCTGAGCGCCAGCATGATCAAGCGGTACGACGAGCACCACCAGG
ACCTGACCCTGCTGAAGGCCCTGGTGCGGCAGCAGCTGCCCGAGA
AGTACAAGGAGATCTTCTTCGACCAGAGCAAGAACGGCTACGCCG
GCTACATCGACGGCGGCGCCAGCCAGGAGGAGTTCTACAAGTTCA
TCAAGCCCATCCTGGAGAAGATGGACGGCACCGAGGAGCTGCTGG
TGAAGCTGAACCGGGAGGACCTGCTGCGGAAGCAGCGGACCTTCG
ACAACGGCAGCATCCCCCACCAGATCCACCTGGGCGAGCTGCACG
CCATCCTGCGGCGGCAGGAGGACTTCTACCCCTTCCTGAAGGACA
ACCGGGAGAAGATCGAGAAGATCCTGACCTTCCGGATCCCCTACT
ACGTGGGCCCCCTGGCCCGGGGCAACAGCCGGTTCGCCTGGATGA
CCCGGAAATCCGAGGAGACCATCACCCCCTGGAACTTCGAGGAGG
TGGTGGACAAGGGCGCCAGCGCCCAGAGCTTCATCGAGCGGATGA
CCAACTTCGACAAGAACCTGCCCAACGAGAAGGTGCTGCCCAAGC
ACAGCCTGCTGTACGAGTACTTCACCGTGTACAACGAGCTGACCA
AGGTGAAGTACGTGACCGAGGGCATGCGGAAGCCCGCCTTCCTGA
GCGGCGAGCAGAAGAAGGCCATCGTGGACCTGCTGTTCAAGACCA
ACCGGAAGGTGACCGTGAAGCAGCTGAAGGAGGACTACTTCAAGA
AGATCGAGTGCTTCGACAGCGTGGAGATCAGCGGCGTGGAGGACC
GGTTCAACGCCAGCCTGGGCACCTACCACGACCTGCTGAAGATCA
TCAAGGACAAGGACTTCCTGGACAACGAGGAGAACGAGGACATCC
TGGAGGACATCGTGCTGACCCTGACCCTGTTCGAGGACCGGGAGA
TGATCGAGGAGCGGCTGAAAACCTACGCCCACCTGTTCGACGACA
AGGTGATGAAGCAGCTGAAGCGGCGGCGGTACACCGGCTGGGGCC
GGCTGAGCCGGAAGCTGATCAACGGCATCCGGGACAAGCAGAGCG
GCAAGACCATCCTGGACTTCCTGAAATCCGACGGCTTCGCCAACC
GGAACTTCATGCAGCTGATCCACGACGACAGCCTGACCTTCAAGG
AGGACATCCAGAAGGCCCAGGTGAGCGGCCAGGGCGACAGCCTGC
ACGAGCACATCGCCAACCTGGCCGGCAGCCCCGCCATCAAGAAGG
GCATCCTGCAGACCGTGAAGGTGGTGGACGAGCTGGTGAAGGTGA
TGGGCCGGCACAAGCCCGAGAACATCGTGATCGAGATGGCCCGGG
AGAACCAGACCACCCAGAAGGGCCAGAAGAACAGCCGGGAGCGGA
TGAAGCGGATCGAGGAGGGCATCAAGGAGCTGGGCAGCCAGATCC
TGAAGGAGCACCCCGTGGAGAACACCCAGCTGCAGAACGAGAAGC
TGTACCTGTACTACCTGCAGAACGGCCGGGACATGTACGTGGACC
AGGAGCTGGACATCAACCGGCTGAGCGACTACGACGTGGCCGCCA
TCGTGCCCCAGAGCTTCCTGAAGGACGACAGCATCGACAACAAGG
TGCTGACCCGGAGCGACAAGGCCCGGGGCAAGAGCGACAACGTGC
CCAGCGAGGAGGTGGTGAAGAAGATGAAGAACTACTGGCGGCAGC
TGCTGAACGCCAAGCTGATCACCCAGCGGAAGTTCGACAACCTGA
CCAAGGCCGAGCGGGGCGGCCTGAGCGAGCTGGACAAGGCCGGCT
TCATCAAGCGGCAGCTGGTGGAGACCCGGCAGATCACCAAGCACG
TGGCCCAGATCCTGGACAGCCGGATGAACACCAAGTACGACGAGA
ACGACAAGCTGATCCGGGAGGTGAAGGTGATCACCCTGAAATCCA
AGCTGGTGAGCGACTTCCGGAAGGACTTCCAGTTCTACAAGGTGC
GGGAGATCAACAACTACCACCACGCCCACGACGCCTACCTGAACG
CCGTGGTGGGCACCGCCCTGATCAAGAAGTACCCCAAGCTGGAGA
GCGAGTTCGTGTACGGCGACTACAAGGTGTACGACGTGCGGAAGA
TGATCGCCAAGAGCGAGCAGGAGATCGGCAAGGCCACCGCCAAGT
ACTTCTTCTACAGCAACATCATGAACTTCTTCAAGACCGAGATCA
CCCTGGCCAACGGCGAGATCCGGAAGCGGCCCCTGATCGAGACCA
ACGGCGAGACCGGCGAGATCGTGTGGGACAAGGGCCGGGACTTCG
CCACCGTGCGGAAGGTGCTGAGCATGCCCCAGGTGAACATCGTGA
AGAAAACCGAGGTGCAGACCGGCGGCTTCAGCAAGGAGAGCATCC
TGCCCAAGCGGAACAGCGACAAGCTGATCGCCCGGAAGAAGGACT
GGGACCCCAAGAAGTACGGCGGCTTCGACAGCCCCACCGTGGCCT
ACAGCGTGCTGGTGGTGGCCAAGGTGGAGAAGGGCAAGAGCAAGA
AGCTGAAATCCGTGAAGGAGCTGCTGGGCATCACCATCATGGAGC
GGAGCAGCTTCGAGAAGAACCCCATCGACTTCCTGGAGGCCAAGG
GCTACAAGGAGGTGAAGAAGGACCTGATCATCAAGCTGCCCAAGT
ACAGCCTGTTCGAGCTGGAGAACGGCCGGAAGCGGATGCTGGCCA
GCGCCGGCGAGCTGCAGAAGGGCAACGAGCTGGCCCTGCCCAGCA
AGTACGTGAACTTCCTGTACCTGGCCAGCCACTACGAGAAGCTGA
AGGGCAGCCCCGAGGACAACGAGCAGAAGCAGCTGTTCGTGGAGC
AGCACAAGCACTACCTGGACGAGATCATCGAGCAGATCAGCGAGT
TCAGCAAGCGGGTGATCCTGGCCGACGCCAACCTGGACAAGGTGC
TGAGCGCCTACAACAAGCACCGGGACAAGCCCATCCGGGAGCAGG
CCGAGAACATCATCCACCTGTTCACCCTGACCAACCTGGGCGCCC
CCGCCGCCTTCAAGTACTTCGACACCACCATCGACCGGAAGCGGT
ACACCAGCACCAAGGAGGTGCTGGACGCCACCCTGATCCACCAGA
GCATCACCGGCCTGTACGAGACCCGGATCGACCTGAGCCAGCTGG
GCGGCGACAGCGGCGGCAAGCGGCCCGCCGCCACCAAGAAGGCCG
GCCAGGCCAAGAAGAAGAAGTCGGGCGGGGGTGGCTCAGACGCTA
AGTCTCTGACCGCTTGGAGCAGAACACTGGTCACCTTCAAGGACG
TGTTCGTCGACTTCACAAGAGAGGAGTGGAAACTGCTGGACACCG
CCCAGCAGATCCTCTATAGAAACGTCATGCTGGAGAACTACAAGA
ATCTGGTGTCTCTGGGCTACCAGCTGACCAAGCCCGACGTGATTC
TGAGGCTGGAGAAGGGCGAGGAGCCTTGGCTGGTGGAGAGAGAGA
TCCACCAAGAAACCCACCCCGACAGCGAAACCGCCTTCGAGATCA
AGAGCAGCGTGGGAGGTGGCGGATCGGGAAAGCGGCCCGCCGCCA
CCAAGAAGGCCGGTCAGGCCAAGAAGAAGAAGGGCAGCTACCCCT
ACGACGTGCCCGACTACGCCTGAGCGGCCGCTTAATTAAGCTGCC
TTCTGCGGGGCTTGCCTTCTGGCCATGCCCTTCTTCTCTCCCTTG
CACCTGTACCTCTTGGTCTTTGAATAAAGCCTGAGTAGGAAGTCT
AGAAAAAAAAAAAAAAAAAAAAAAAAAAAAAAAAAAAAAAAAAAA
AAAAAAAAAAAAAAAAAAAAAAAAAAAAAAAAAAAAA

[0225] In some embodiments, a site-specific disrupting agent comprises the amino acid sequence of SEQ ID NOs: 86 or 82. In some embodiments, a site-specific disrupting agent described herein comprises an amino acid sequence of SEQ ID NO: 86 or 82 or a sequence with at least 80, 85, 90, 95, 99, or 100% identity thereto, or having no more than 20, 19, 18, 17, 16, 15, 14, 13, 12, 11, 10, 9, 8, 7, 6, 5, 4, 3, 2, or 1 positions of difference thereto.

EZH2-dCas9-KRAB protein
(SEQ ID NO. 86)
MAPKKKRKVGGSGGSGQTGKKSEKGPVCWRKRVKSEYMRLRQLKR
FRRADEVKSMFSSNRQKLQQNFMVEDETVLHNIPYMGDEVLDQDG
TFIEELIKNYDGKVHGDRECGFINDEIFVELVNALGQYNDDDDDD
DGDDPEEREEKQKDLEDHRDDKESRPPRKFPSDKIFEAISSMFPD
KGTAEELKEKYKELTEQQLPGALPPECTPNIDGPNAKSVQREQSL
HSFHTLFCRRCFKYDCFLHPFHATPNTYKRKNTETALDNKPCGPQ
CYQHLEGAKEFAAALTAERIKTPPKRPGGRRRGRLPNNSSRPSTP
TINVLESKDTDSDREAGTETGGENNDKEEEEKKDETSSSSEANSR
CQTPIKMKPNIEPPENVEWSGAEASMFRVLIGTYYDNFCAIARLI
GTKTCRQVYEFRVKESSIIAPAPAEDVDTPPRKKKRKHRLWAAHC
RKIQLKKDGSSNHVYNYQPCDHPRQPCDSSCPCVIAQNFCEKFCQ
CSSECQNRFPGCRCKAQCNTKQCPCYLAVRECDPDLCLTCGAADH
WDSKNVSCKNCSIQRGSKKHLLLAPSDVAGWGIFIKDPVQKNEFI
SEYCGEIISQDEADRRGKVYDKYMCSFLFNLNNDFVVDATRKGNK
IRFANHSVNPNCYAKVMMVNGDHRIGIFAKRAIQTGEELFFDYRY
SQADALKYVGIEREMEIPSTGGSGGSGGSGGSGGSGRPDKKYSIG
LAIGTNSVGWAVITDEYKVPSKKFKVLGNTDRHSIKKNLIGALLF
DSGETAEATRLKRTARRRYTRRKNRICYLQEIFSNEMAKVDDSFF
HRLEESFLVEEDKKHERHPIFGNIVDEVAYHEKYPTIYHLRKKLV
DSTDKADLRLIYLALAHMIKFRGHFLIEGDLNPDNSDVDKLFIQL
VQTYNQLFEENPINASGVDAKAILSARLSKSRRLENLIAQLPGEK
KNGLFGNLIALSLGLTPNFKSNFDLAEDAKLQLSKDTYDDDLDNL
LAQIGDQYADLFLAAKNLSDAILLSDILRVNTEITKAPLSASMIK
RYDEHHQDLTLLKALVRQQLPEKYKEIFFDQSKNGYAGYIDGGAS
QEEFYKFIKPILEKMDGTEELLVKLNREDLLRKQRTFDNGSIPHQ
IHLGELHAILRRQEDFYPFLKDNREKIEKILTFRIPYYVGPLARG
NSRFAWMTRKSEETITPWNFEEVVDKGASAQSFIERMTNFDKNLP
NEKVLPKHSLLYEYFTVYNELTKVKYVTEGMRKPAFLSGEQKKAI
VDLLFKTNRKVTVKQLKEDYFKKIECFDSVEISGVEDRFNASLGT
YHDLLKIIKDKDFLDNEENEDILEDIVLTLTLFEDREMIEERLKT
YAHLFDDKVMKQLKRRRYTGWGRLSRKLINGIRDKQSGKTILDFL
KSDGFANRNFMQLIHDDSLTFKEDIQKAQVSGQGDSLHEHIANLA
GSPAIKKGILQTVKVVDELVKVMGRHKPENIVIEMARENQTTQKG
QKNSRERMKRIEEGIKELGSQILKEHPVENTQLQNEKLYLYYLQN
GRDMYVDQELDINRLSDYDVAAIVPQSFLKDDSIDNKVLTRSDKA
RGKSDNVPSEEVVKKMKNYWRQLLNAKLITQRKFDNLTKAERGGL
SELDKAGFIKRQLVETRQITKHVAQILDSRMNTKYDENDKLIREV
KVITLKSKLVSDFRKDFQFYKVREINNYHHAHDAYLNAVVGTALI
KKYPKLESEFVYGDYKVYDVRKMIAKSEQEIGKATAKYFFYSNIM
NFFKTEITLANGEIRKRPLIETNGETGEIVWDKGRDFATVRKVLS
MPQVNIVKKTEVQTGGFSKESILPKRNSDKLIARKKDWDPKKYGG
FDSPTVAYSVLVVAKVEKGKSKKLKSVKELLGITIMERSSFEKNP
IDFLEAKGYKEVKKDLIIKLPKYSLFELENGRKRMLASAGELQKG
NELALYNKHRDKPIREQAENIIHLFTLTNLGAPAAFKYFDTTIDR
KRYTSTKEVLDATLIHQSITGLYETRIDLSQLGGDSGGKRPAATK
KAGQAKKKKSGGGGSDAKSLTAWSRTLVTFKDVFVDFTREEWKLL
DTAQQILYRNVMLENYKNLVSLGYQLTKPDVILRLEKGEEPWLVE
REIHQETHPDSETAFEIKSSVGGGGSGKRPAATKKAGQAKKKKGS
YPYDVPDYA
EZH2-dCas9-KRAB protein without HA tag
(SEQ ID NO. 82)
MAPKKKRKVGGSGGSGQTGKKSEKGPVCWRKRVKSEYMRLRQLKR
FRRADEVKSMFSSNRQKILERTEILNQEWKQRRIQPVHILTSVSS
LRGTRECSVTSDLDFPTQVIPLKTLNAVASVPIMYSWSPLQQNFM
VEDETVLHNIPYMGDEVLDQDGTFIEELIKNYDGKVHGDRECGFI
NDEIFVELVNALGQYNDDDDDDDGDDPEEREEKQKDLEDHRDDKE
SRPPRKFPSDKIFEAISSMFPDKGTAEELKEKYKELTEQQLPGAL
PPECTPNIDGPNAKSVQREQSLHSFHTLFCRRCFKYDCFLHPFHA
TPNTYKRKNTETALDNKPCGPQCYQHLEGAKEFAAALTAERIKTP
PKRPGGRRRGRLPNNSSRPSTPTINVLESKDTDSDREAGTETGGE
NNDKEEEEKKDETSSSSEANSRCQTPIKMKPNIEPPENVEWSGAE
ASMFRVLIGTYYDNFCAIARLIGTKTCRQVYEFRVKESSIIAPAP
AEDVDTPPRKKKRKHRLWAAHCRKIQLKKDGSSNHVYNYQPCDHP
RQPCDSSCPCVIAQNFCEKFCQCSSECQNRFPGCRCKAQCNTKQC
PCYLAVRECDPDLCLTCGAADHWDSKNVSCKNCSIQRGSKKHLLL
APSDVAGWGIFIKDPVQKNEFISEYCGEIISQDEADRRGKVYDKY
MCSFLFNLNNDFVVDATRKGNKIRFANHSVNPNCYAKVMMVNGDH
RIGIFAKRAIQTGEELFFDYRYSQADALKYVGIEREMEIPSTGGS
GGSGGSGGSGGSGRPDKKYSIGLAIGTNSVGWAVITDEYKVPSKK
FKVLGNTDRHSIKKNLIGALLFDSGETAEATRLKRTARRRYTRRK
NRICYLQEIFSNEMAKVDDSFFHRLEESFLVEEDKKHERHPIFGN
IVDEVAYHEKYPTIYHLRKKLVDSTDKADLRLIYLALAHMIKFRG
HFLIEGDLNPDNSDVDKLFIQLVQTYNQLFEENPINASGVDAKAI
LSARLSKSRRLENLIAQLPGEKKNGLFGNLIALSLGLTPNFKSNF
DLAEDAKLQLSKDTYDDDLDNLLAQIGDQYADLFLAAKNLSDAIL
LSDILRVNTEITKAPLSASMIKRYDEHHQDLTLLKALVRQQLPEK
YKEIFFDQSKNGYAGYIDGGASQEEFYKFIKPILEKMDGTEELLV
KLNREDLLRKQRTFDNGSIPHQIHLGELHAILRRQEDFYPFLKDN
REKIEKILTFRIPYYVGPLARGNSRFAWMTRKSEETITPWNFEEV
VDKGASAQSFIERMTNFDKNLPNEKVLPKHSLLYEYFTVYNELTK
VKYVTEGMRKPAFLSGEQKKAIVDLLFKTNRKVTVKQLKEDYFKK
IECFDSVEISGVEDRFNASLGTYHDLLKIIKDKDFLDNEENEDIL
EDIVLTLTLFEDREMIEERLKTYAHLFDDKVMKQLKRRRYTGWGR
LSRKLINGIRDKQSGKTILDFLKSDGFANRNFMQLIHDDSLTFKE
DIQKAQVSGQGDSLHEHIANLAGSPAIKKGILQTVKVVDELVKVM
GRHKPENIVIEMARENQTTQKGQKNSRERMKRIEEGIKELGSQIL
KEHPVENTQLQNEKLYLYYLQNGRDMYVDQELDINRLSDYDVAAI
VPQSFLKDDSIDNKVLTRSDKARGKSDNVPSEEVVKKMKNYWRQL
LNAKLITQRKFDNLTKAERGGLSELDKAGFIKRQLVETRQITKHV
AQILDSRMNTKYDENDKLIREVKVITLKSKLVSDFRKDFQFYKVR
EINNYHHAHDAYLNAVVGTALIKKYPKLESEFVYGDYKVYDVRKM
IAKSEQEIGKATAKYFFYSNIMNFFKTEITLANGEIRKRPLIETN
GETGEIVWDKGRDFATVRKVLSMPQVNIVKKTEVQTGGFSKESIL
PKRNSDKLIARKKDWDPKKYGGFDSPTVAYSVLVVAKVEKGKSKK
LKSVKELLGITIMERSSFEKNPIDFLEAKGYKEVKKDLIIKLPKY
SLFELENGRKRMLASAGELQKGNELALYNKHRDKPIREQAENIIH
LFTLTNLGAPAAFKYFDTTIDRKRYTSTKEVLDATLIHQSITGLY
ETRIDLSQLGGDSGGKRPAATKKAGQAKKKKSGGGGSDAKSLTAW
SRTLVTFKDVFVDFTREEWKLLDTAQQILYRNVMLENYKNLVSLG
YQLTKPDVILRLEKGEEPWLVEREIHQETHPDSETAFEIKSSVGG
GGSGKRPAATKKAGQAKKKKGS

[0226] In some embodiments, a site-specific disrupting agent comprises a CRISPR/Cas molecule comprising Cas9. In some embodiments, the site-specific disrupting agent is encoded by the nucleic acid sequence of SEQ ID NO: 217 (e.g., mRNA encoding the site-specific disrupting agent). In some embodiments, a nucleic acid described herein comprises a nucleic acid sequence of SEQ ID NO: 217 or a sequence with at least 80, 85, 90, 95, 99, or 100% identity thereto, or having no more than 20, 19, 18, 17, 16, 15, 14, 13, 12, 11, 10, 9, 8, 7, 6, 5, 4, 3, 2, or 1 positions of difference thereto.

Cas9 mRNA (MR-28127)
(SEQ ID NO: 217)
AGGAAAUAAGAGAGAAAAGAAGAGUAAGAAGAAAUAUAAGAGCCA
CCAUGGCCCCCAAGAAGAAGCGGAAGGUGGGCAUCCACGGCGUGC
CCGCCGCCGACAAGAAGUACAGCAUCGGCCUGGACAUCGGCACCA
ACAGCGUGGGCUGGGCCGUGAUCACCGACGAGUACAAGGUGCCCA
GCAAGAAGUUCAAGGUGCUGGGCAACACCGACCGGCACAGCAUCA
AGAAGAACCUGAUCGGCGCCCUGCUGUUCGACAGCGGCGAGACCG
CCGAGGCCACCCGGCUGAAGCGGACCGCCCGGCGGCGGUACACCC
GGCGGAAGAACCGGAUCUGCUACCUGCAGGAGAUCUUCAGCAACG
AGAUGGCCAAGGUGGACGACAGCUUCUUCCACCGGCUGGAGGAGA
GCUUCCUGGUGGAGGAGGACAAGAAGCACGAGCGGCACCCCAUCU
UCGGCAACAUCGUGGACGAGGUGGCCUACCACGAGAAGUACCCCA
CCAUCUACCACCUGCGGAAGAAGCUGGUGGACAGCACCGACAAGG
CCGACCUGCGGCUGAUCUACCUGGCCCUGGCCCACAUGAUCAAGU
UCCGGGGCCACUUCCUGAUCGAGGGCGACCUGAACCCCGACAACA
GCGACGUGGACAAGCUGUUCAUCCAGCUGGUGCAGACCUACAACC
AGCUGUUCGAGGAGAACCCCAUCAACGCCAGCGGCGUGGACGCCA
AGGCCAUCCUGAGCGCCCGGCUGAGCAAGAGCCGGCGGCUGGAGA
ACCUGAUCGCCCAGCUGCCCGGCGAGAAGAAGAACGGCCUGUUCG
GCAACCUGAUCGCCCUGAGCCUGGGCCUGACCCCCAACUUCAAGA
GCAACUUCGACCUGGCCGAGGACGCCAAGCUGCAGCUGAGCAAGG
ACACCUACGACGACGACCUGGACAACCUGCUGGCCCAGAUCGGCG
ACCAGUACGCCGACCUGUUCCUGGCCGCCAAGAACCUGAGCGACG
CCAUCCUGCUGAGCGACAUCCUGCGGGUGAACACCGAGAUCACCA
AGGCCCCCCUGAGCGCCAGCAUGAUCAAGCGGUACGACGAGCACC
ACCAGGACCUGACCCUGCUGAAGGCCCUGGUGCGGCAGCAGCUGC
CCGAGAAGUACAAGGAGAUCUUCUUCGACCAGAGCAAGAACGGCU
ACGCCGGCUACAUCGACGGCGGCGCCAGCCAGGAGGAGUUCUACA
AGUUCAUCAAGCCCAUCCUGGAGAAGAUGGACGGCACCGAGGAGC
UGCUGGUGAAGCUGAACCGGGAGGACCUGCUGCGGAAGCAGCGGA
CCUUCGACAACGGCAGCAUCCCCCACCAGAUCCACCUGGGCGAGC
UGCACGCCAUCCUGCGGCGGCAGGAGGACUUCUACCCCUUCCUGA
AGGACAACCGGGAGAAGAUCGAGAAGAUCCUGACCUUCCGGAUCC
CCUACUACGUGGGCCCCCUGGCCCGGGGCAACAGCCGGUUCGCCU
GGAUGACCCGGAAAUCCGAGGAGACCAUCACCCCCUGGAACUUCG
AGGAGGUGGUGGACAAGGGCGCCAGCGCCCAGAGCUUCAUCGAGC
GGAUGACCAACUUCGACAAGAACCUGCCCAACGAGAAGGUGCUGC
CCAAGCACAGCCUGCUGUACGAGUACUUCACCGUGUACAACGAGC
UGACCAAGGUGAAGUACGUGACCGAGGGCAUGCGGAAGCCCGCCU
UCCUGAGCGGCGAGCAGAAGAAGGCCAUCGUGGACCUGCUGUUCA
AGACCAACCGGAAGGUGACCGUGAAGCAGCUGAAGGAGGACUACU
UCAAGAAGAUCGAGUGCUUCGACAGCGUGGAGAUCAGCGGCGUGG
AGGACCGGUUCAACGCCAGCCUGGGCACCUACCACGACCUGCUGA
AGAUCAUCAAGGACAAGGACUUCCUGGACAACGAGGAGAACGAGG
ACAUCCUGGAGGACAUCGUGCUGACCCUGACCCUGUUCGAGGACC
GGGAGAUGAUCGAGGAGCGGCUGAAAACCUACGCCCACCUGUUCG
ACGACAAGGUGAUGAAGCAGCUGAAGCGGCGGCGGUACACCGGCU
GGGGCCGGCUGAGCCGGAAGCUGAUCAACGGCAUCCGGGACAAGC
AGAGCGGCAAGACCAUCCUGGACUUCCUGAAAUCCGACGGCUUCG
CCAACCGGAACUUCAUGCAGCUGAUCCACGACGACAGCCUGACCU
UCAAGGAGGACAUCCAGAAGGCCCAGGUGAGCGGCCAGGGCGACA
GCCUGCACGAGCACAUCGCCAACCUGGCCGGCAGCCCCGCCAUCA
AGAAGGGCAUCCUGCAGACCGUGAAGGUGGUGGACGAGCUGGUGA
AGGUGAUGGGCCGGCACAAGCCCGAGAACAUCGUGAUCGAGAUGG
CCCGGGAGAACCAGACCACCCAGAAGGGCCAGAAGAACAGCCGGG
AGCGGAUGAAGCGGAUCGAGGAGGGCAUCAAGGAGCUGGGCAGCC
AGAUCCUGAAGGAGCACCCCGUGGAGAACACCCAGCUGCAGAACG
AGAAGCUGUACCUGUACUACCUGCAGAACGGCCGGGACAUGUACG
UGGACCAGGAGCUGGACAUCAACCGGCUGAGCGACUACGACGUGG
ACCACAUCGUGCCCCAGAGCUUCCUGAAGGACGACAGCAUCGACA
ACAAGGUGCUGACCCGGAGCGACAAGAACCGGGGCAAGAGCGACA
ACGUGCCCAGCGAGGAGGUGGUGAAGAAGAUGAAGAACUACUGGC
GGCAGCUGCUGAACGCCAAGCUGAUCACCCAGCGGAAGUUCGACA
ACCUGACCAAGGCCGAGCGGGGCGGCCUGAGCGAGCUGGACAAGG
CCGGCUUCAUCAAGCGGCAGCUGGUGGAGACCCGGCAGAUCACCA
AGCACGUGGCCCAGAUCCUGGACAGCCGGAUGAACACCAAGUACG
ACGAGAACGACAAGCUGAUCCGGGAGGUGAAGGUGAUCACCCUGA
AAUCCAAGCUGGUGAGCGACUUCCGGAAGGACUUCCAGUUCUACA
AGGUGCGGGAGAUCAACAACUACCACCACGCCCACGACGCCUACC
UGAACGCCGUGGUGGGCACCGCCCUGAUCAAGAAGUACCCCAAGC
UGGAGAGCGAGUUCGUGUACGGCGACUACAAGGUGUACGACGUGC
GGAAGAUGAUCGCCAAGAGCGAGCAGGAGAUCGGCAAGGCCACCG
CCAAGUACUUCUUCUACAGCAACAUCAUGAACUUCUUCAAGACCG
AGAUCACCCUGGCCAACGGCGAGAUCCGGAAGCGGCCCCUGAUCG
AGACCAACGGCGAGACCGGCGAGAUCGUGUGGGACAAGGGCCGGG
ACUUCGCCACCGUGCGGAAGGUGCUGAGCAUGCCCCAGGUGAACA
UCGUGAAGAAAACCGAGGUGCAGACCGGCGGCUUCAGCAAGGAGA
GCAUCCUGCCCAAGCGGAACAGCGACAAGCUGAUCGCCCGGAAGA
AGGACUGGGACCCCAAGAAGUACGGCGGCUUCGACAGCCCCACCG
UGGCCUACAGCGUGCUGGUGGUGGCCAAGGUGGAGAAGGGCAAGA
GCAAGAAGCUGAAAUCCGUGAAGGAGCUGCUGGGCAUCACCAUCA
UGGAGCGGAGCAGCUUCGAGAAGAACCCCAUCGACUUCCUGGAGG
CCAAGGGCUACAAGGAGGUGAAGAAGGACCUGAUCAUCAAGCUGC
CCAAGUACAGCCUGUUCGAGCUGGAGAACGGCCGGAAGCGGAUGC
UGGCCAGCGCCGGCGAGCUGCAGAAGGGCAACGAGCUGGCCCUGC
CCAGCAAGUACGUGAACUUCCUGUACCUGGCCAGCCACUACGAGA
AGCUGAAGGGCAGCCCCGAGGACAACGAGCAGAAGCAGCUGUUCG
UGGAGCAGCACAAGCACUACCUGGACGAGAUCAUCGAGCAGAUCA
GCGAGUUCAGCAAGCGGGUGAUCCUGGCCGACGCCAACCUGGACA
AGGUGCUGAGCGCCUACAACAAGCACCGGGACAAGCCCAUCCGGG
AGCAGGCCGAGAACAUCAUCCACCUGUUCACCCUGACCAACCUGG
GCGCCCCCGCCGCCUUCAAGUACUUCGACACCACCAUCGACCGGA
AGCGGUACACCAGCACCAAGGAGGUGCUGGACGCCACCCUGAUCC
ACCAGAGCAUCACCGGCCUGUACGAGACCCGGAUCGACCUGAGCC
AGCUGGGCGGCGACAGCGGCGGCAAGCGGCCCGCCGCCACCAAGA
AGGCCGGCCAGGCCAAGAAGAAGAAGGGCAGCUACCCCUACGACG
UGCCCGACUACGCCUGAGCGGCCGCUUAAUUAAGCUGCCUUCUGC
GGGGCUUGCCUUCUGGCCAUGCCCUUCUUCUCUCCCUUGCACCUG
UACCUCUUGGUCUUUGAAUAAAGCCUGAGUAGGAAGUCUAGAAAA
AAAAAAAAAAAAAAAAAAAAAAAAAAAAAAAAAAAAAAAAAAAAA
AAAAAAAAAAAAAAAAAAAAAAAAAAAAAAA

[0227] In some embodiments, a site-specific disrupting agent comprises the amino acid sequence of SEQ ID NOs: 218 or 84. In some embodiments, a site-specific disrupting agent described herein comprises an amino acid sequence of SEQ ID NO: 218 or 84 or a sequence with at least 80, 85, 90, 95, 99, or 100% identity thereto, or having no more than 20, 19, 18, 17, 16, 15, 14, 13, 12, 11, 10, 9, 8, 7, 6, 5, 4, 3, 2, or 1 positions of difference thereto.

Cas9 Protein Sequence (corresponding
to MR-28127)
(SEQ ID NO: 218)
MAPKKKRKVGIHGVPAADKKYSIGLDIGTNSVGWAVITDEYKVPS
KKFKVLGNTDRHSIKKNLIGALLFDSGETAEATRLKRTARRRYTR
RKNRICYLQEIFSNEMAKVDDSFFHRLEESFLVEEDKKHERHPIF
GNIVDEVAYHEKYPTIYHLRKKLVDSTDKADLRLIYLALAHMIKF
RGHFLIEGDLNPDNSDVDKLFIQLVQTYNQLFEENPINASGVDAK
AILSARLSKSRRLENLIAQLPGEKKNGLFGNLIALSLGLTPNFKS
NFDLAEDAKLQLSKDTYDDDLDNLLAQIGDQYADLFLAAKNLSDA
ILLSDILRVNTEITKAPLSASMIKRYDEHHQDLTLLKALVRQQLP
EKYKEIFFDQSKNGYAGYIDGGASQEEFYKFIKPILEKMDGTEEL
LVKLNREDLLRKQRTFDNGSIPHQIHLGELHAILRRQEDFYPFLK
DNREKIEKILTFRIPYYVGPLARGNSRFAWMTRKSEETITPWNFE
EVVDKGASAQSFIERMTNFDKNLPNEKVLPKHSLLYEYFTVYNEL
TKVKYVTEGMRKPAFLSGEQKKAIVDLLFKTNRKVTVKQLKEDYF
KKIECFDSVEISGVEDRFNASLGTYHDLLKIIKDKDFLDNEENED
ILEDIVLTLTLFEDREMIEERLKTYAHLFDDKVMKQLKRRRYTGW
GRLSRKLINGIRDKQSGKTILDFLKSDGFANRNFMQLIHDDSLTF
KEDIQKAQVSGQGDSLHEHIANLAGSPAIKKGILQTVKVVDELVK
VMGRHKPENIVIEMARENQTTQKGQKNSRERMKRIEEGIKELGSQ
ILKEHPVENTQLQNEKLYLYYLQNGRDMYVDQELDINRLSDYDVD
HIVPQSFLKDDSIDNKVLTRSDKNRGKSDNVPSEEVVKKMKNYWR
QLLNAKLITQRKFDNLTKAERGGLSELDKAGFIKRQLVETRQITK
HVAQILDSRMNTKYDENDKLIREVKVITLKSKLVSDFRKDFQFYK
VREINNYHHAHDAYLNAVVGTALIKKYPKLESEFVYGDYKVYDVR
KMIAKSEQEIGKATAKYFFYSNIMNFFKTEITLANGEIRKRPLIE
TNGETGEIVWDKGRDFATVRKVLSMPQVNIVKKTEVQTGGFSKES
ILPKRNSDKLIARKKDWDPKKYGGFDSPTVAYSVLVVAKVEKGKS
KKLKSVKELLGITIMERSSFEKNPIDFLEAKGYKEVKKDLIIKLP
KYSLFELENGRKRMLASAGELQKGNELALPSKYVNFLYLASHYEK
LKGSPEDNEQKQLFVEQHKHYLDEIIEQISEFSKRVILADANLDK
VLSAYNKHRDKPIREQAENIIHLFTLTNLGAPAAFKYFDTTIDRK
RYTSTKEVLDATLIHQSITGLYETRIDLSQLGGDSGGKRPAATKK
AGQAKKKKGSYPYDVPDYA
Cas9 Protein Sequence (corresponding
to MR-28127) without HA tag
(SEQ ID NO: 84)
MAPKKKRKVGIHGVPAADKKYSIGLDIGTNSVGWAVITDEYKVPS
KKFKVLGNTDRHSIKKNLIGALLFDSGETAEATRLKRTARRRYTR
RKNRICYLQEIFSNEMAKVDDSFFHRLEESFLVEEDKKHERHPIF
GNIVDEVAYHEKYPTIYHLRKKLVDSTDKADLRLIYLALAHMIKF
RGHFLIEGDLNPDNSDVDKLFIQLVQTYNQLFEENPINASGVDAK
AILSARLSKSRRLENLIAQLPGEKKNGLFGNLIALSLGLTPNFKS
NFDLAEDAKLQLSKDTYDDDLDNLLAQIGDQYADLFLAAKNLSDA
ILLSDILRVNTEITKAPLSASMIKRYDEHHQDLTLLKALVRQQLP
EKYKEIFFDQSKNGYAGYIDGGASQEEFYKFIKPILEKMDGTEEL
LVKLNREDLLRKQRTFDNGSIPHQIHLGELHAILRRQEDFYPFLK
DNREKIEKILTFRIPYYVGPLARGNSRFAWMTRKSEETITPWNFE
EVVDKGASAQSFIERMTNFDKNLPNEKVLPKHSLLYEYFTVYNEL
TKVKYVTEGMRKPAFLSGEQKKAIVDLLFKTNRKVTVKQLKEDYF
KKIECFDSVEISGVEDRFNASLGTYHDLLKIIKDKDFLDNEENED
ILEDIVLTLTLFEDREMIEERLKTYAHLFDDKVMKQLKRRRYTGW
GRLSRKLINGIRDKQSGKTILDFLKSDGFANRNFMQLIHDDSLTF
KEDIQKAQVSGQGDSLHEHIANLAGSPAIKKGILQTVKVVDELVK
VMGRHKPENIVIEMARENQTTQKGQKNSRERMKRIEEGIKELGSQ
ILKEHPVENTQLQNEKLYLYYLQNGRDMYVDQELDINRLSDYDVD
HIVPQSFLKDDSIDNKVLTRSDKNRGKSDNVPSEEVVKKMKNYWR
QLLNAKLITQRKFDNLTKAERGGLSELDKAGFIKRQLVETRQITK
HVAQILDSRMNTKYDENDKLIREVKVITLKSKLVSDFRKDFQFYK
VREINNYHHAHDAYLNAVVGTALIKKYPKLESEFVYGDYKVYDVR
KMIAKSEQEIGKATAKYFFYSNIMNFFKTEITLANGEIRKRPLIE
TNGETGEIVWDKGRDFATVRKVLSMPQVNIVKKTEVQTGGFSKES
ILPKRNSDKLIARKKDWDPKKYGGFDSPTVAYSVLVVAKVEKGKS
KKLKSVKELLGITIMERSSFEKNPIDFLEAKGYKEVKKDLIIKLP
KYSLFELENGRKRMLASAGELQKGNELALPSKYVNFLYLASHYEK
LKGSPEDNEQKQLFVEQHKHYLDEIIEQISEFSKRVILADANLDK
VLSAYNKHRDKPIREQAENIIHLFTLTNLGAPAAFKYFDTTIDRK
RYTSTKEVLDATLIHQSITGLYETRIDLSQLGGDSGGKRPAATKK
AGQAKKKKGS

[0228] In some embodiments, a site-specific disrupting agent comprises a nuclear localization sequence (NLS). In some embodiments, the site-specific disrupting agent comprises an NLS, e.g., an SV40 NLS at the N-terminus. In some embodiments, the site-specific disrupting agent comprises an NLS, e.g., an SV40 NLS at the C-terminus. In some embodiments, the site-specific disrupting agent comprises an NLS, e.g., a nucleoplasmin NLS at the C-terminus. In some embodiments, the site-specific disrupting agent comprises a first NLS at the N-terminus and a second NLS at the C-terminus. In some embodiments the first and the second NLS have the same sequence. In some embodiments, the first and the second NLS have different sequences. In some embodiments, the site-specific disrupting agent comprises a first NLS at the N-terminus, a second NLS, and a third NLS at the C-terminus. In some embodiments, at least two NLSs have the same sequence. In some embodiments, the first and the second NLS have the same sequence and the third NLS has a different sequence than the first and the second NLS. In some embodiments, the site-specific disrupting agent comprises an SV40 NLS, e.g., the site-specific disrupting agent comprises a sequence according to PKKKRK (SEQ ID NO: 63). In some embodiments, the site-specific disrupting agent comprises a nucleoplasmin NLS, e.g., the site-specific disrupting agent comprises a sequence of KRPAATKKAGQAKKK (SEQ ID NO: 64). In some embodiments, the site-specific disrupting agent comprises a C-terminal sequence comprising one or more of, e.g., any one or both of: a nucleoplasmin nuclear localization sequence and an HA-tag. In some embodiments, the site-specific disrupting agent comprises an epitope tag, e.g., an HA tag: YPYDVPDYA (SEQ ID NO: 65). In some embodiments, the site-specific disrupting agent may comprise two copies of the epitope tag.

[0229] While an epitope tag is useful in many research contexts, it is sometimes desirable to omit an epitope tag in a therapeutic context. Accordingly, in some embodiments, the site-specific disrupting agent lacks an epitope tag. In some embodiments, a site-specific disrupting agent described herein comprises a sequence provided herein (or a sequence with at least 80, 85, 90, 95, 99, or 100% identity thereto, or having no more than 20, 19, 18, 17, 16, 15, 14, 13, 12, 11, 10, 9, 8, 7, 6, 5, 4, 3, 2, or 1 positions of difference thereto), but lacking the HA tag of SEQ ID NO: 65. In some embodiments, a nucleic acid described herein comprises a sequence provided herein (or a sequence with at least 80, 85, 90, 95, 99, or 100% identity thereto, or having no more than 20, 19, 18, 17, 16, 15, 14, 13, 12, 11, 10, 9, 8, 7, 6, 5, 4, 3, 2, or 1 positions of difference thereto), but lacking a region encoding the HA tag of SEQ ID NO: 65. In some embodiments, the site-specific disrupting agent does not comprise an NLS. In some embodiments, the site-specific disrupting agent does not comprise an epitope tag. In some embodiments the site-specific disrupting agent does not comprise an HA tag. In some embodiments, the site-specific disrupting agent does not comprise an HA tag sequence according to SEQ ID NO: 65.

[0230] In some embodiments, a site-specific disrupting agent comprises a targeting moiety comprising a Zn finger molecule and an effector moiety comprising EZH2 or a functional fragment or variant thereof. In some embodiments, the site-specific disrupting agent is encoded by the nucleic acid sequence of SEQ ID NOs: 219, 220, 222, 223, 233, or 234, or a sequence with at least 80, 85, 90, 95, 99, or 100% identity thereto, or having no more than 20, 19, 18, 17, 16, 15, 14, 13, 12, 11, 10, 9, 8, 7, 6, 5, 4, 3, 2, or 1 positions of difference thereto.

[0231] In some embodiments, a site-specific disrupting agent comprises a targeting moiety comprising a Zn finger molecule and an effector moiety comprising DNMT3 (e.g., DNMT3a or DNMT3L) or a functional fragment or variant thereof. In some embodiments, the site-specific disrupting agent is encoded by the nucleic acid sequence of SEQ ID NOs: 221, 231, or 236-239, or a sequence with at least 80, 85, 90, 95, 99, or 100% identity thereto, or having no more than 20, 19, 18, 17, 16, 15, 14, 13, 12, 11, 10, 9, 8, 7, 6, 5, 4, 3, 2, or 1 positions of difference thereto.

[0232] In some embodiments, a site-specific disrupting agent comprises a targeting moiety comprising a Zn finger molecule and an effector moiety comprising G9A or a functional fragment or variant thereof. In some embodiments, the site-specific disrupting agent is encoded by the nucleic acid sequence of SEQ ID NOs: 224, 225, or 227-230, or a sequence with at least 80, 85, 90, 95, 99, or 100% identity thereto, or having no more than 20, 19, 18, 17, 16, 15, 14, 13, 12, 11, 10, 9, 8, 7, 6, 5, 4, 3, 2, or 1 positions of difference thereto.

[0233] In some embodiments, a site-specific disrupting agent comprises a targeting moiety comprising a Zn finger molecule and an effector moiety comprising HDAC8 or a functional fragment or variant thereof. In some embodiments, the site-specific disrupting agent is encoded by the nucleic acid sequence of SEQ ID NOs: 226, 232, 235, or 240-242, or a sequence with at least 80, 85, 90, 95, 99, or 100% identity thereto, or having no more than 20, 19, 18, 17, 16, 15, 14, 13, 12, 11, 10, 9, 8, 7, 6, 5, 4, 3, 2, or 1 positions of difference thereto.

TABLE 3
Additional Exemplary Site-Specific Disrupting Agent Encoding Sequences

| Ref. | | |
|---|---|---|
| number | | |
| and | | |
| (SEQ | Agent | |
| ID NO) | Description | Sequence |
| MR- | EZH2- | AGGAAATAAGAGAGAAAAGAAGAGTAAGAAGAAATATAAGAGCCACCATG |
| 29950 | CXCL1 ZF6 | GCCCCCAAGAAGAAGCGGAAGGTGGGCGGCAGCGGCGGCAGCGGCCAGAC |
| (SEQ ID | T7 | CGGCAAGAAGAGCGAGAAGGGCCCCGTGTGCTGGCGGAAGCGGGTGAAGA |
| NO: 219) | | GCGAGTACATGCGGCTGCGGCAGCTGAAGCGGTTCCGGCGGGCCGACGAG |
| | | GTGAAGAGCATGTTCAGCAGCAACCGGCAGAAGATCCTGGAGCGGACCGA |
| | | GATCCTGAACCAGGAGTGGAAGCAGCGGCGAATCCAGCCCGTGCACATCC |
| | | TGACCAGCGTGAGCAGCCTGCGGGGCACCCGGGAGTGCAGCGTGACCAGC |
| | | GACCTGGACTTCCCCACCCAGGTGATCCCCCTAAAGACCCTGAACGCCGT |
| | | GGCCAGCGTGCCCATCATGTACAGCTGGAGCCCCCTGCAGCAGAACTTCA |
| | | TGGTGGAGGACGAGACCGTGCTGCACAACATCCCCTACATGGGCGACGAG |
| | | GTGCTGGACCAGGACGGCACCTTCATCGAGGAGCTGATCAAGAACTACGA |
| | | CGGCAAGGTGCACGGCGACCGGGAGTGCGGCTTCATCAACGACGAGATCT |
| | | TCGTGGAGCTGGTGAACGCCCTGGGCCAGTACAACGACGACGACGACGAC |
| | | GACGACGGCGACGACCCCGAGGAGCGGGAGGAGAAGCAGAAGGACCTGGA |
| | | GGACCACCGGGACGACAAGGAGAGCCGGCCCCCCCGGAAGTTCCCCAGCG |
| | | ACAAGATCTTCGAGGCCATCAGCAGCATGTTCCCCGACAAGGGCACCGCC |
| | | GAGGAGCTGAAGGAGAAGTACAAGGAGCTGACCGAGCAGCAGCTGCCCGG |
| | | CGCCCTGCCCCCCGAGTGCACCCCCAACATCGACGGCCCCAACGCCAAGA |
| | | GCGTGCAGCGGGAGCAGAGCCTGCACAGCTTCCACACCCTGTTCTGCCGG |
| | | CGGTGCTTCAAGTACGACTGCTTCCTGCACCCCTTCCACGCCACCCCCAA |
| | | CACCTACAAGCGGAAGAACACCGAGACCGCCCTGGACAACAAGCCCTGCG |
| | | GCCCCCAGTGCTACCAGCACCTGGAGGGCGCCAAGGAGTTCGCCGCCGCC |
| | | CTGACCGCCGAGCGGATCAAGACCCCCCCCAAGCGGCCCGGCGGCCGGCG |
| | | GCGGGGCCGGCTGCCCAACAACAGCAGCCGGCCCAGCACCCCCACCATCA |
| | | ACGTGCTGGAGAGCAAGGACACCGACAGCGACCGGGAGGCCGGCACCGAG |
| | | ACCGGCGGCGAGAACAACGACAAGGAGGAGGAGGAGAAGAAGGACGAGAC |
| | | CAGCAGCAGCAGCGAGGCCAACAGCCGGTGCCAGACCCCCATCAAGATGA |
| | | AGCCCAACATCGAGCCCCCCGAGAACGTGGAGTGGAGCGGCGCCGAGGCC |
| | | AGCATGTTCCGGGTGCTGATCGGCACCTACTACGACAACTTCTGCGCCAT |
| | | CGCCCGGCTGATCGGCACCAAGACCTGCCGGCAGGTGTACGAGTTCCGGG |
| | | TGAAGGAGAGCAGCATCATCGCCCCCGCCCCCGCCGAGGACGTGGACACC |
| | | CCCCCCCGGAAGAAGAAGCGGAAGCACCGGCTGTGGGCCGCCCACTGCCG |
| | | GAAGATCCAGCTGAAGAAGGACGGCAGCAGCAACCACGTGTACAACTACC |
| | | AGCCCTGCGACCACCCCCGGCAGCCCTGCGACAGCAGCTGCCCCTGCGTG |
| | | ATCGCCCAGAACTTCTGCGAGAAGTTCTGCCAGTGCAGCAGCGAGTGCCA |
| | | GAACCGGTTCCCCGGCTGCCGGTGCAAGGCCCAGTGCAACACCAAGCAGT |
| | | GCCCCTGCTACCTGGCCGTGCGGGAGTGCGACCCCGACCTGTGCCTGACC |
| | | TGCGGCGCCGCCGACCACTGGGACAGCAAGAACGTGAGCTGCAAGAACTG |
| | | CAGCATCCAGCGGGGCAGCAAGAAGCACCTGCTGCTGGCCCCCAGCGACG |
| | | TGGCCGGCTGGGGCATCTTCATCAAGGACCCCGTGCAGAAGAACGAGTTC |
| | | ATCAGCGAGTACTGCGGCGAGATCATCAGCCAGGACGAGGCCGACCGGCG |
| | | GGGCAAGGTGTACGACAAGTACATGTGCAGCTTCCTGTTCAACCTGAACA |
| | | ACGACTTCGTGGTGGACGCCACCCGGAAGGGCAACAAGATCCGGTTCGCC |
| | | AACCACAGCGTGAACCCCAACTGCTACGCCAAGGTGATGATGGTGAACGG |
| | | CGACCACCGGATCGGCATCTTCGCCAAGCGGGCCATCCAGACCGGCGAGG |
| | | AGCTGTTCTTCGACTACCGGTACAGCCAGGCCGACGCCCTGAAGTACGTG |
| | | GGCATCGAGCGGGAGATGGAGATCCCCGGCAGCAGCGGATCCCTGGAGCC |
| | | CGGCGAAAAGCCTTACAAGTGTCCCGAGTGCGGAAAGAGCTTCAGCAGAG |
| | | CCGATAATCTGACCGAGCACCAAAGGACCCACACCGGAGAGAAGCCTTAT |
| | | AAGTGTCCCGAATGCGGCAAAAGCTTTTCTAGAAGCGATCATCTGACCAA |
| | | CCACCAGAGGACACACACCGGAGAAAAACCTTACAAATGCCCCGAGTGCG |
| | | GCAAAAGCTTCTCCCAGAGCAGCAATCTGGTGAGACACCAAAGGACCCAC |
| | | ACCGGCGAAAAACCCTATAAATGCCCCGAATGTGGCAAGAGCTTTAGCAC |
| | | ATCCGGCGAGCTGGTGAGGCATCAAAGAACACATACCGGCGAGAAGCCCT |
| | | ACAAGTGCCCCGAGTGTGGAAAAAGCTTCAGCACCCACCTCGATCTGATC |
| | | AGACACCAGAGGACCCATACCGGAGAGAAACCCTACAAATGTCCCGAGTG |
| | | CGGAAAGTCCTTTAGCCAGCTGGCCCATCTGAGAGCTCATCAAAGGACAC |
| | | ACACCGGCGAGAAGCCTTACAAGTGTCCCGAGTGCGGAAAATCCTTCTCC |
| | | CAACTGGCCCATCTGAGGGCCCACCAGAGAACCCACACCGGCAAAAAGAC |
| | | CTCCGCTAGCGGCAGCGGCGGCGGCAGCGGCGGCAAGCGGCCCGCCGCCA |
| | | CCAAGAAGGCCGGCCAGGCCAAGAAGAAGAAGGGCAGCTACCCCTACGAC |
| | | GTGCCCGACTACGCCTGAGCGGCCGCTTAATTAAGCTGCCTTCTGCGGGG |
| | | CTTGCCTTCTGGCCATGCCCTTCTTCTCTCCCTTGCACCTGTACCTCTTG |
| | | GTCTTTGAATAAAGCCTGAGTAGGAAGTCTAGAAAAAAAAAAAAAAAAAA |
| | | AAAAAAAAAAAAAAAAAAAAAAAAAAAAAAAAAAAAAAAAAAAAAAAAAA |
| | | AAAAAAAAAAAA |
| MR- | EZH2- | AGGAAATAAGAGAGAAAAGAAGAGTAAGAAGAAATATAAGAGCCACCATG |
| 29949 | CXCL1 ZF1 | GCCCCCAAGAAGAAGCGGAAGGTGGGCGGCAGCGGCGGCAGCGGCCAGAC |
| (SEQ ID | T7 | CGGCAAGAAGAGCGAGAAGGGCCCCGTGTGCTGGCGGAAGCGGGTGAAGA |
| NO: 220) | | GCGAGTACATGCGGCTGCGGCAGCTGAAGCGGTTCCGGCGGGCCGACGAG |
| | | GTGAAGAGCATGTTCAGCAGCAACCGGCAGAAGATCCTGGAGCGGACCGA |
| | | GATCCTGAACCAGGAGTGGAAGCAGCGGCGAATCCAGCCCGTGCACATCC |
| | | TGACCAGCGTGAGCAGCCTGCGGGGCACCCGGGAGTGCAGCGTGACCAGC |
| | | GACCTGGACTTCCCCACCCAGGTGATCCCCCTAAAGACCCTGAACGCCGT |
| | | GGCCAGCGTGCCCATCATGTACAGCTGGAGCCCCCTGCAGCAGAACTTCA |
| | | TGGTGGAGGACGAGACCGTGCTGCACAACATCCCCTACATGGGCGACGAG |
| | | GTGCTGGACCAGGACGGCACCTTCATCGAGGAGCTGATCAAGAACTACGA |
| | | CGGCAAGGTGCACGGCGACCGGGAGTGCGGCTTCATCAACGACGAGATCT |
| | | TCGTGGAGCTGGTGAACGCCCTGGGCCAGTACAACGACGACGACGACGAC |
| | | GACGACGGCGACGACCCCGAGGAGCGGGAGGAGAAGCAGAAGGACCTGGA |
| | | GGACCACCGGGACGACAAGGAGAGCCGGCCCCCCCGGAAGTTCCCCAGCG |
| | | ACAAGATCTTCGAGGCCATCAGCAGCATGTTCCCCGACAAGGGCACCGCC |
| | | GAGGAGCTGAAGGAGAAGTACAAGGAGCTGACCGAGCAGCAGCTGCCCGG |
| | | CGCCCTGCCCCCCGAGTGCACCCCCAACATCGACGGCCCCAACGCCAAGA |
| | | GCGTGCAGCGGGAGCAGAGCCTGCACAGCTTCCACACCCTGTTCTGCCGG |
| | | CGGTGCTTCAAGTACGACTGCTTCCTGCACCCCTTCCACGCCACCCCCAA |
| | | CACCTACAAGCGGAAGAACACCGAGACCGCCCTGGACAACAAGCCCTGCG |
| | | GCCCCCAGTGCTACCAGCACCTGGAGGGCGCCAAGGAGTTCGCCGCCGCC |
| | | CTGACCGCCGAGCGGATCAAGACCCCCCCCAAGCGGCCCGGCGGCCGGCG |
| | | GCGGGGCCGGCTGCCCAACAACAGCAGCCGGCCCAGCACCCCCACCATCA |
| | | ACGTGCTGGAGAGCAAGGACACCGACAGCGACCGGGAGGCCGGCACCGAG |
| | | ACCGGCGGCGAGAACAACGACAAGGAGGAGGAGGAGAAGAAGGACGAGAC |
| | | CAGCAGCAGCAGCGAGGCCAACAGCCGGTGCCAGACCCCCATCAAGATGA |
| | | AGCCCAACATCGAGCCCCCCGAGAACGTGGAGTGGAGCGGCGCCGAGGCC |
| | | AGCATGTTCCGGGTGCTGATCGGCACCTACTACGACAACTTCTGCGCCAT |
| | | CGCCCGGCTGATCGGCACCAAGACCTGCCGGCAGGTGTACGAGTTCCGGG |
| | | TGAAGGAGAGCAGCATCATCGCCCCCGCCCCCGCCGAGGACGTGGACACC |
| | | CCCCCCCGGAAGAAGAAGCGGAAGCACCGGCTGTGGGCCGCCCACTGCCG |
| | | GAAGATCCAGCTGAAGAAGGACGGCAGCAGCAACCACGTGTACAACTACC |
| | | AGCCCTGCGACCACCCCCGGCAGCCCTGCGACAGCAGCTGCCCCTGCGTG |
| | | ATCGCCCAGAACTTCTGCGAGAAGTTCTGCCAGTGCAGCAGCGAGTGCCA |
| | | GAACCGGTTCCCCGGCTGCCGGTGCAAGGCCCAGTGCAACACCAAGCAGT |
| | | GCCCCTGCTACCTGGCCGTGCGGGAGTGCGACCCCGACCTGTGCCTGACC |
| | | TGCGGCGCCGCCGACCACTGGGACAGCAAGAACGTGAGCTGCAAGAACTG |
| | | CAGCATCCAGCGGGGCAGCAAGAAGCACCTGCTGCTGGCCCCCAGCGACG |
| | | TGGCCGGCTGGGGCATCTTCATCAAGGACCCCGTGCAGAAGAACGAGTTC |
| | | ATCAGCGAGTACTGCGGCGAGATCATCAGCCAGGACGAGGCCGACCGGCG |
| | | GGGCAAGGTGTACGACAAGTACATGTGCAGCTTCCTGTTCAACCTGAACA |
| | | ACGACTTCGTGGTGGACGCCACCCGGAAGGGCAACAAGATCCGGTTCGCC |
| | | AACCACAGCGTGAACCCCAACTGCTACGCCAAGGTGATGATGGTGAACGG |
| | | CGACCACCGGATCGGCATCTTCGCCAAGCGGGCCATCCAGACCGGCGAGG |
| | | AGCTGTTCTTCGACTACCGGTACAGCCAGGCCGACGCCCTGAAGTACGTG |
| | | GGCATCGAGCGGGAGATGGAGATCCCCGGCAGCAGCGGATCCCTGGAGCC |
| | | CGGCGAAAAGCCTTACAAATGTCCCGAATGCGGAAAGAGCTTCAGCAGAG |
| | | CCGACAATCTGACCGAACATCAGAGAACCCATACCGGAGAAAAACCTTAC |
| | | AAATGTCCCGAGTGCGGCAAAAGCTTCTCCCAAGCCGGACATCTGGCCAG |
| | | CCACCAAAGGACACATACCGGCGAGAAACCCTACAAGTGCCCCGAGTGCG |
| | | GCAAGTCCTTCTCTAGATCCGATGAGCTGGTCAGACATCAGAGAACCCAT |
| | | ACCGGCGAGAAGCCTTATAAGTGCCCCGAATGTGGCAAGTCCTTCAGCCA |
| | | GAGAGCTCATCTGGAGAGGCATCAAAGAACACACACCGGAGAGAAACCTT |
| | | ACAAGTGTCCCGAGTGTGGAAAGAGCTTCTCCAGAAGGGACGAGCTGAAC |
| | | GTCCACCAAAGAACCCATACCGGCGAAAAGCCCTATAAATGCCCCGAGTG |
| | | TGGAAAATCCTTTTCTAGATCCGACCATCTGACAACCCACCAGAGGACCC |
| | | ATACCGGAGAGAAGCCCTACAAATGCCCCGAGTGTGGAAAAAGCTTCTCT |
| | | AGAAACGATGCTCTGACAGAGCACCAAAGGACCCACACCGGCAAAAAGAC |
| | | CAGCGCTAGCGGCAGCGGCGGCGGCAGCGGCGGCAAGCGGCCCGCCGCCA |
| | | CCAAGAAGGCCGGCCAGGCCAAGAAGAAGAAGGGCAGCTACCCCTACGAC |
| | | GTGCCCGACTACGCCTGAGCGGCCGCTTAATTAAGCTGCCTTCTGCGGGG |
| | | CTTGCCTTCTGGCCATGCCCTTCTTCTCTCCCTTGCACCTGTACCTCTTG |
| | | GTCTTTGAATAAAGCCTGAGTAGGAAGTCTAGAAAAAAAAAAAAAAAAAA |
| | | AAAAAAAAAAAAAAAAAAAAAAAAAAAAAAAAAAAAAAAAAAAAAAAAAA |
| | | AAAAAAAAAAAA |
| MR- | CXCL1 ZF5- | AGGAAATAAGAGAGAAAAGAAGAGTAAGAAGAAATATAAGAGCCACCATG |
| 29945 | DNMT3a-3L | GCCCCCAAGAAGAAGCGGAAGGTGGGCATCCACGGCGTGCCCGCCGCCGG |
| (SEQ ID | SP6 | CAGCAGCGGATCCCTGGAGCCCGGCGAAAAGCCTTACAAGTGCCCCGAGT |
| NO: 221) | | GTGGCAAATCCTTTAGCACCACCGGAAATCTGACCGTCCACCAGAGAACA |
| | | CATACCGGCGAGAAACCCTACAAGTGTCCCGAGTGCGGCAAATCCTTCAG |
| | | CCAGCTGGCCCATCTGAGAGCCCATCAAAGGACCCATACCGGCGAGAAAC |
| | | CTTACAAGTGTCCCGAATGTGGAAAGTCCTTTAGCAGCCCCGCCGATCTG |
| | | ACAAGACATCAAAGAACCCACACCGGCGAGAAGCCCTATAAATGTCCCGA |
| | | GTGTGGAAAGTCCTTCAGCCAGAGCGGCAATCTGACCGAGCATCAAAGAA |
| | | CCCATACCGGCGAAAAGCCCTATAAGTGCCCCGAATGCGGAAAAAGCTTC |
| | | TCCACAAGCGGCGAGCTGGTGAGACACCAAAGGACACATACCGGCGAAAA |
| | | GCCTTATAAATGCCCCGAGTGCGGCAAGAGCTTCTCTAGAAAGGACAATC |
| | | TGAAGAACCACCAAAGAACACACACCGGCGAGAAGCCCTACAAATGCCCC |
| | | GAGTGCGGCAAGAGCTTTAGCCAGTCCAGCAACCTCGTGAGACATCAGAG |
| | | GACACATACCGGAAAAAAGACCAGCGCTAGCGGCAGCGGCGGCGGCAGCG |
| | | GCGGCAACCACGACCAGGAGTTCGACCCCCCCAAGGTGTACCCCCCCGTG |
| | | CCCGCCGAGAAGCGGAAGCCCATCCGGGTGCTGAGCCTGTTCGACGGCAT |
| | | CGCCACCGGCCTGCTGGTGCTGAAGGACCTGGGCATCCAGGTGGACCGGT |
| | | ACATCGCCAGCGAGGTGTGCGAGGACAGCATCACCGTGGGCATGGTGCGG |
| | | CACCAGGGCAAGATCATGTACGTGGGCGACGTGCGGAGCGTGACCCAGAA |
| | | GCACATCCAGGAGTGGGGCCCCTTCGACCTGGTGATCGGCGGCAGCCCCT |
| | | GCAACGACCTGAGCATCGTGAACCCCGCCCGGAAGGGCCTGTACGAGGGC |
| | | ACCGGCCGGCTGTTCTTCGAGTTCTACCGGCTGCTGCACGACGCCCGGCC |
| | | CAAGGAGGGCGACGACCGGCCCTTCTTCTGGCTGTTCGAGAACGTGGTGG |
| | | CCATGGGCGTGAGCGACAAGCGGGACATCAGCCGGTTCCTGGAGAGCAAC |
| | | CCCGTGATGATCGACGCCAAGGAGGTGAGCGCCGCCCACCGGGCCCGGTA |
| | | CTTCTGGGGCAACCTGCCCGGCATGAACCGGCCCCTGGCCAGCACCGTGA |
| | | ACGACAAGCTGGAGCTGCAGGAGTGCCTGGAGCACGGCCGGATCGCCAAG |
| | | TTCAGCAAGGTGCGGACCATCACCACCCGGAGCAACAGCATCAAGCAGGG |
| | | CAAGGACCAGCACTTCCCCGTGTTCATGAACGAGAAGGAGGACATCCTGT |
| | | GGTGCACCGAGATGGAGCGGGTGTTCGGCTTCCCCGTGCACTACACCGAC |
| | | GTGAGCAACATGAGCCGGCTGGCCCGGCAGCGGCTGCTGGGCCGGAGCTG |
| | | GAGCGTGCCCGTGATCCGGCACCTGTTCGCCCCCCTGAAGGAGTACTTCG |
| | | CCTGCGTGAGCAGCGGCAACAGCAACGCCAACAGCCGGGGCCCCAGCTTC |
| | | AGCAGCGGCCTGGTGCCCCTGAGCCTGCGGGGCAGCCACATGAATCCTCT |
| | | GGAGATGTTCGAGACAGTGCCCGTGTGGAGAAGGCAACCCGTGAGGGTGC |
| | | TGAGCCTCTTCGAGGACATTAAGAAGGAGCTGACCTCTCTGGGCTTTCTG |
| | | GAATCCGGCAGCGACCCCGGCCAGCTGAAACACGTGGTGGACGTGACCGA |
| | | CACAGTGAGGAAGGACGTGGAAGAGTGGGGCCCCTTTGACCTCGTGTATG |
| | | GAGCCACACCTCCTCTCGGCCACACATGCGATAGGCCTCCCAGCTGGTAT |
| | | CTCTTCCAGTTCCACAGACTGCTCCAGTACGCCAGACCTAAGCCCGGCAG |
| | | CCCCAGACCCTTCTTCTGGATGTTCGTGGACAATCTGGTGCTGAACAAGG |
| | | AGGATCTGGATGTGGCCAGCAGATTTCTGGAGATGGAACCCGTGACAATC |
| | | CCCGACGTGCATGGCGGCTCTCTGCAGAACGCCGTGAGAGTGTGGTCCAA |
| | | CATCCCCGCCATTAGAAGCAGACACTGGGCTCTGGTGAGCGAGGAGGAAC |
| | | TGTCTCTGCTGGCCCAGAATAAGCAGTCCTCCAAGCTGGCCGCCAAGTGG |
| | | CCCACCAAGCTGGTGAAGAACTGCTTTCTGCCTCTGAGGGAGTATTTCAA |
| | | GTATTTCAGCACCGAACTGACCAGCAGCCTGAGCGGCGGCAAGCGGCCCG |
| | | CCGCCACCAAGAAGGCCGGCCAGGCCAAGAAGAAGAAGGGCAGCTACCCC |
| | | TACGACGTGCCCGACTACGCCTGAGCGGCCGCTTAATTAAGCTGCCTTCT |
| | | GCGGGGCTTGCCTTCTGGCCATGCCCTTCTTCTCTCCCTTGCACCTGTAC |
| | | CTCTTGGTCTTTGAATAAAGCCTGAGTAGGAAGTCTAGAAAAAAAAAAAA |
| | | AAAAAAAAAAAAAAAAAAAAAAAAAAAAAAAAAAAAAAAAAAAAAAAAAA |
| | | AAAAAAAAAAAAAAAAAA |
| MR- | EZH2- | AGGAAATAAGAGAGAAAAGAAGAGTAAGAAGAAATATAAGAGCCACCATG |
| 29908 | CXCL1 ZF5 | GCCCCCAAGAAGAAGCGGAAGGTGGGCGGCAGCGGCGGCAGCGGCCAGAC |
| (SEQ ID | T7 | CGGCAAGAAGAGCGAGAAGGGCCCCGTGTGCTGGCGGAAGCGGGTGAAGA |
| NO: 222) | | GCGAGTACATGCGGCTGCGGCAGCTGAAGCGGTTCCGGCGGGCCGACGAG |
| | | GTGAAGAGCATGTTCAGCAGCAACCGGCAGAAGATCCTGGAGCGGACCGA |
| | | GATCCTGAACCAGGAGTGGAAGCAGCGGCGAATCCAGCCCGTGCACATCC |
| | | TGACCAGCGTGAGCAGCCTGCGGGGCACCCGGGAGTGCAGCGTGACCAGC |
| | | GACCTGGACTTCCCCACCCAGGTGATCCCCCTAAAGACCCTGAACGCCGT |
| | | GGCCAGCGTGCCCATCATGTACAGCTGGAGCCCCCTGCAGCAGAACTTCA |
| | | TGGTGGAGGACGAGACCGTGCTGCACAACATCCCCTACATGGGCGACGAG |
| | | GTGCTGGACCAGGACGGCACCTTCATCGAGGAGCTGATCAAGAACTACGA |
| | | CGGCAAGGTGCACGGCGACCGGGAGTGCGGCTTCATCAACGACGAGATCT |
| | | TCGTGGAGCTGGTGAACGCCCTGGGCCAGTACAACGACGACGACGACGAC |
| | | GACGACGGCGACGACCCCGAGGAGCGGGAGGAGAAGCAGAAGGACCTGGA |
| | | GGACCACCGGGACGACAAGGAGAGCCGGCCCCCCCGGAAGTTCCCCAGCG |
| | | ACAAGATCTTCGAGGCCATCAGCAGCATGTTCCCCGACAAGGGCACCGCC |
| | | GAGGAGCTGAAGGAGAAGTACAAGGAGCTGACCGAGCAGCAGCTGCCCGG |
| | | CGCCCTGCCCCCCGAGTGCACCCCCAACATCGACGGCCCCAACGCCAAGA |
| | | GCGTGCAGCGGGAGCAGAGCCTGCACAGCTTCCACACCCTGTTCTGCCGG |
| | | CGGTGCTTCAAGTACGACTGCTTCCTGCACCCCTTCCACGCCACCCCCAA |
| | | CACCTACAAGCGGAAGAACACCGAGACCGCCCTGGACAACAAGCCCTGCG |
| | | GCCCCCAGTGCTACCAGCACCTGGAGGGCGCCAAGGAGTTCGCCGCCGCC |
| | | CTGACCGCCGAGCGGATCAAGACCCCCCCCAAGCGGCCCGGCGGCCGGCG |
| | | GCGGGGCCGGCTGCCCAACAACAGCAGCCGGCCCAGCACCCCCACCATCA |
| | | ACGTGCTGGAGAGCAAGGACACCGACAGCGACCGGGAGGCCGGCACCGAG |
| | | ACCGGCGGCGAGAACAACGACAAGGAGGAGGAGGAGAAGAAGGACGAGAC |
| | | CAGCAGCAGCAGCGAGGCCAACAGCCGGTGCCAGACCCCCATCAAGATGA |
| | | AGCCCAACATCGAGCCCCCCGAGAACGTGGAGTGGAGCGGCGCCGAGGCC |
| | | AGCATGTTCCGGGTGCTGATCGGCACCTACTACGACAACTTCTGCGCCAT |
| | | CGCCCGGCTGATCGGCACCAAGACCTGCCGGCAGGTGTACGAGTTCCGGG |
| | | TGAAGGAGAGCAGCATCATCGCCCCCGCCCCCGCCGAGGACGTGGACACC |
| | | CCCCCCCGGAAGAAGAAGCGGAAGCACCGGCTGTGGGCCGCCCACTGCCG |
| | | GAAGATCCAGCTGAAGAAGGACGGCAGCAGCAACCACGTGTACAACTACC |
| | | AGCCCTGCGACCACCCCCGGCAGCCCTGCGACAGCAGCTGCCCCTGCGTG |
| | | ATCGCCCAGAACTTCTGCGAGAAGTTCTGCCAGTGCAGCAGCGAGTGCCA |
| | | GAACCGGTTCCCCGGCTGCCGGTGCAAGGCCCAGTGCAACACCAAGCAGT |
| | | GCCCCTGCTACCTGGCCGTGCGGGAGTGCGACCCCGACCTGTGCCTGACC |
| | | TGCGGCGCCGCCGACCACTGGGACAGCAAGAACGTGAGCTGCAAGAACTG |
| | | CAGCATCCAGCGGGGCAGCAAGAAGCACCTGCTGCTGGCCCCCAGCGACG |
| | | TGGCCGGCTGGGGCATCTTCATCAAGGACCCCGTGCAGAAGAACGAGTTC |
| | | ATCAGCGAGTACTGCGGCGAGATCATCAGCCAGGACGAGGCCGACCGGCG |
| | | GGGCAAGGTGTACGACAAGTACATGTGCAGCTTCCTGTTCAACCTGAACA |
| | | ACGACTTCGTGGTGGACGCCACCCGGAAGGGCAACAAGATCCGGTTCGCC |
| | | AACCACAGCGTGAACCCCAACTGCTACGCCAAGGTGATGATGGTGAACGG |
| | | CGACCACCGGATCGGCATCTTCGCCAAGCGGGCCATCCAGACCGGCGAGG |
| | | AGCTGTTCTTCGACTACCGGTACAGCCAGGCCGACGCCCTGAAGTACGTG |
| | | GGCATCGAGCGGGAGATGGAGATCCCCGGCAGCAGCGGATCCCTGGAGCC |
| | | CGGCGAAAAGCCTTACAAGTGCCCCGAGTGTGGCAAATCCTTTAGCACCA |
| | | CCGGAAATCTGACCGTCCACCAGAGAACACATACCGGCGAGAAACCCTAC |
| | | AAGTGTCCCGAGTGCGGCAAATCCTTCAGCCAGCTGGCCCATCTGAGAGC |
| | | CCATCAAAGGACCCATACCGGCGAGAAACCTTACAAGTGTCCCGAATGTG |
| | | GAAAGTCCTTTAGCAGCCCCGCCGATCTGACAAGACATCAAAGAACCCAC |
| | | ACCGGCGAGAAGCCCTATAAATGTCCCGAGTGTGGAAAGTCCTTCAGCCA |
| | | GAGCGGCAATCTGACCGAGCATCAAAGAACCCATACCGGCGAAAAGCCCT |
| | | ATAAGTGCCCCGAATGCGGAAAAAGCTTCTCCACAAGCGGCGAGCTGGTG |
| | | AGACACCAAAGGACACATACCGGCGAAAAGCCTTATAAATGCCCCGAGTG |
| | | CGGCAAGAGCTTCTCTAGAAAGGACAATCTGAAGAACCACCAAAGAACAC |
| | | ACACCGGCGAGAAGCCCTACAAATGCCCCGAGTGCGGCAAGAGCTTTAGC |
| | | CAGTCCAGCAACCTCGTGAGACATCAGAGGACACATACCGGAAAAAAGAC |
| | | CAGCGCTAGCGGCAGCGGCGGCGGCAGCGGCGGCAAGCGGCCCGCCGCCA |
| | | CCAAGAAGGCCGGCCAGGCCAAGAAGAAGAAGGGCAGCTACCCCTACGAC |
| | | GTGCCCGACTACGCCTGAGCGGCCGCTTAATTAAGCTGCCTTCTGCGGGG |
| | | CTTGCCTTCTGGCCATGCCCTTCTTCTCTCCCTTGCACCTGTACCTCTTG |
| | | GTCTTTGAATAAAGCCTGAGTAGGAAGTCTAGAAAAAAAAAAAAAAAAAA |
| | | AAAAAAAAAAAAAAAAAAAAAAAAAAAAAAAAAAAAAAAAAAAAAAAAAA |
| | | AAAAAAAAAAAA |
| MR- | EZH2- | AGGAAATAAGAGAGAAAAGAAGAGTAAGAAGAAATATAAGAGCCACCATG |
| 29907 | CXCL1 ZF2 | GCCCCCAAGAAGAAGCGGAAGGTGGGCGGCAGCGGCGGCAGCGGCCAGAC |
| (SEQ ID | T7 | CGGCAAGAAGAGCGAGAAGGGCCCCGTGTGCTGGCGGAAGCGGGTGAAGA |
| NO: 223) | | GCGAGTACATGCGGCTGCGGCAGCTGAAGCGGTTCCGGCGGGCCGACGAG |
| | | GTGAAGAGCATGTTCAGCAGCAACCGGCAGAAGATCCTGGAGCGGACCGA |
| | | GATCCTGAACCAGGAGTGGAAGCAGCGGCGAATCCAGCCCGTGCACATCC |
| | | TGACCAGCGTGAGCAGCCTGCGGGGCACCCGGGAGTGCAGCGTGACCAGC |
| | | GACCTGGACTTCCCCACCCAGGTGATCCCCCTAAAGACCCTGAACGCCGT |
| | | GGCCAGCGTGCCCATCATGTACAGCTGGAGCCCCCTGCAGCAGAACTTCA |
| | | TGGTGGAGGACGAGACCGTGCTGCACAACATCCCCTACATGGGCGACGAG |
| | | GTGCTGGACCAGGACGGCACCTTCATCGAGGAGCTGATCAAGAACTACGA |
| | | CGGCAAGGTGCACGGCGACCGGGAGTGCGGCTTCATCAACGACGAGATCT |
| | | TCGTGGAGCTGGTGAACGCCCTGGGCCAGTACAACGACGACGACGACGAC |
| | | GACGACGGCGACGACCCCGAGGAGCGGGAGGAGAAGCAGAAGGACCTGGA |
| | | GGACCACCGGGACGACAAGGAGAGCCGGCCCCCCCGGAAGTTCCCCAGCG |
| | | ACAAGATCTTCGAGGCCATCAGCAGCATGTTCCCCGACAAGGGCACCGCC |
| | | GAGGAGCTGAAGGAGAAGTACAAGGAGCTGACCGAGCAGCAGCTGCCCGG |
| | | CGCCCTGCCCCCCGAGTGCACCCCCAACATCGACGGCCCCAACGCCAAGA |
| | | GCGTGCAGCGGGAGCAGAGCCTGCACAGCTTCCACACCCTGTTCTGCCGG |
| | | CGGTGCTTCAAGTACGACTGCTTCCTGCACCCCTTCCACGCCACCCCCAA |
| | | CACCTACAAGCGGAAGAACACCGAGACCGCCCTGGACAACAAGCCCTGCG |
| | | GCCCCCAGTGCTACCAGCACCTGGAGGGCGCCAAGGAGTTCGCCGCCGCC |
| | | CTGACCGCCGAGCGGATCAAGACCCCCCCCAAGCGGCCCGGCGGCCGGCG |
| | | GCGGGGCCGGCTGCCCAACAACAGCAGCCGGCCCAGCACCCCCACCATCA |
| | | ACGTGCTGGAGAGCAAGGACACCGACAGCGACCGGGAGGCCGGCACCGAG |
| | | ACCGGCGGCGAGAACAACGACAAGGAGGAGGAGGAGAAGAAGGACGAGAC |
| | | CAGCAGCAGCAGCGAGGCCAACAGCCGGTGCCAGACCCCCATCAAGATGA |
| | | AGCCCAACATCGAGCCCCCCGAGAACGTGGAGTGGAGCGGCGCCGAGGCC |
| | | AGCATGTTCCGGGTGCTGATCGGCACCTACTACGACAACTTCTGCGCCAT |
| | | CGCCCGGCTGATCGGCACCAAGACCTGCCGGCAGGTGTACGAGTTCCGGG |
| | | TGAAGGAGAGCAGCATCATCGCCCCCGCCCCCGCCGAGGACGTGGACACC |
| | | CCCCCCCGGAAGAAGAAGCGGAAGCACCGGCTGTGGGCCGCCCACTGCCG |
| | | GAAGATCCAGCTGAAGAAGGACGGCAGCAGCAACCACGTGTACAACTACC |
| | | AGCCCTGCGACCACCCCCGGCAGCCCTGCGACAGCAGCTGCCCCTGCGTG |
| | | ATCGCCCAGAACTTCTGCGAGAAGTTCTGCCAGTGCAGCAGCGAGTGCCA |
| | | GAACCGGTTCCCCGGCTGCCGGTGCAAGGCCCAGTGCAACACCAAGCAGT |
| | | GCCCCTGCTACCTGGCCGTGCGGGAGTGCGACCCCGACCTGTGCCTGACC |
| | | TGCGGCGCCGCCGACCACTGGGACAGCAAGAACGTGAGCTGCAAGAACTG |
| | | CAGCATCCAGCGGGGCAGCAAGAAGCACCTGCTGCTGGCCCCCAGCGACG |
| | | TGGCCGGCTGGGGCATCTTCATCAAGGACCCCGTGCAGAAGAACGAGTTC |
| | | ATCAGCGAGTACTGCGGCGAGATCATCAGCCAGGACGAGGCCGACCGGCG |
| | | GGGCAAGGTGTACGACAAGTACATGTGCAGCTTCCTGTTCAACCTGAACA |
| | | ACGACTTCGTGGTGGACGCCACCCGGAAGGGCAACAAGATCCGGTTCGCC |
| | | AACCACAGCGTGAACCCCAACTGCTACGCCAAGGTGATGATGGTGAACGG |
| | | CGACCACCGGATCGGCATCTTCGCCAAGCGGGCCATCCAGACCGGCGAGG |
| | | AGCTGTTCTTCGACTACCGGTACAGCCAGGCCGACGCCCTGAAGTACGTG |
| | | GGCATCGAGCGGGAGATGGAGATCCCCGGCAGCAGCGGATCCCTGGAGCC |
| | | CGGCGAAAAACCCTATAAGTGCCCCGAGTGCGGCAAGAGCTTTAGCGATC |
| | | CCGGCCATCTGGTGAGGCATCAGAGGACCCACACCGGCGAAAAGCCTTAC |
| | | AAATGCCCCGAGTGTGGAAAAAGCTTCAGCAGAAGCGATCATCTGACCAC |
| | | CCATCAGAGGACACATACCGGCGAGAAGCCTTATAAATGCCCCGAATGTG |
| | | GAAAGAGCTTCTCCAGAAGCGACCATCTGACCAACCACCAGAGGACCCAT |
| | | ACCGGAGAAAAACCTTACAAATGCCCCGAGTGTGGAAAGTCCTTCAGCTC |
| | | CCCCGCCGATCTGACAAGACATCAGAGAACCCACACCGGCGAAAAACCTT |
| | | ATAAATGTCCCGAGTGTGGCAAAAGCTTCTCCGACAAGAAGGATCTGACA |
| | | AGACACCAAAGGACCCACACCGGCGAGAAACCTTATAAATGTCCCGAATG |
| | | CGGAAAAAGCTTTAGCAGAAACGACGCTCTGACCGAACACCAGAGAACAC |
| | | ATACCGGAGAGAAACCCTATAAATGTCCCGAGTGCGGAAAATCCTTCAGC |
| | | ACCACCGGCGCTCTGACAGAGCATCAGAGGACACACACCGGCAAAAAGAC |
| | | CTCCGCTAGCGGCAGCGGCGGCGGCAGCGGCGGCAAGCGGCCCGCCGCCA |
| | | CCAAGAAGGCCGGCCAGGCCAAGAAGAAGAAGGGCAGCTACCCCTACGAC |
| | | GTGCCCGACTACGCCTGAGCGGCCGCTTAATTAAGCTGCCTTCTGCGGGG |
| | | CTTGCCTTCTGGCCATGCCCTTCTTCTCTCCCTTGCACCTGTACCTCTTG |
| | | GTCTTTGAATAAAGCCTGAGTAGGAAGTCTAGAAAAAAAAAAAAAAAAAA |
| | | AAAAAAAAAAAAAAAAAAAAAAAAAAAAAAAAAAAAAAAAAAAAAAAAAA |
| | | AAAAAAAAAAAA |
| MR- | G9A-CXCL1 | AGGAAATAAGAGAGAAAAGAAGAGTAAGAAGAAATATAAGAGCCACCATG |
| 29906 | ZF4 SP6 | GCCCCCAAGAAGAAGCGGAAGGTGGGCATCCACGGCGTGCCCGCCGCCTC |
| (SEQ ID | | GGGCGGGGGTGGCTCAGGAAATAGGGCTATCAGAACCGAGAAGATCATCT |
| NO: 224) | | GTAGGGACGTGGCTAGAGGCTACGAGAACGTGCCCATTCCTTGCGTGAAT |
| | | GGCGTGGATGGCGAACCTTGCCCCGAGGACTACAAATACATCTCCGAGAA |
| | | CTGCGAAACCAGCACAATGAACATCGACAGAAACATCACCCACCTCCAGC |
| | | ACTGCACATGTGTGGATGACTGCTCCTCCAGCAACTGTCTGTGCGGCCAG |
| | | CTCTCCATCAGATGCTGGTACGACAAGGACGGCAGACTGCTGCAAGAGTT |
| | | CAACAAGATCGAACCCCCTCTCATCTTCGAGTGTAACCAAGCTTGCAGCT |
| | | GCTGGAGAAACTGCAAGAATAGAGTGGTCCAGAGCGGCATCAAGGTGAGA |
| | | CTGCAACTGTACAGAACCGCCAAGATGGGATGGGGAGTGAGGGCTCTGCA |
| | | AACCATTCCCCAAGGCACCTTCATCTGCGAATACGTGGGCGAACTGATCT |
| | | CCGACGCCGAAGCTGACGTGAGAGAGGACGACAGCTATCTCTTCGATCTG |
| | | GACAATAAGGACGGCGAGGTGTACTGCATCGACGCTAGATATTACGGCAA |
| | | CATCTCTAGATTCATCAACCACCTCTGCGATCCCAACATCATTCCCGTGA |
| | | GGGTGTTCATGCTGCACCAAGATCTGAGGTTCCCTAGAATCGCCTTCTTC |
| | | AGCTCTAGAGACATCAGAACCGGCGAGGAGCTGGGCTTCGATTACGGCGA |
| | | TAGATTCTGGGACATCAAGTCCAAGTACTTCACATGCCAGTGCGGCAGCG |
| | | AGAAGTGTAAGCACAGCGCTGAGGCCATTGCTCTGGAGCAGTCTAGACTG |
| | | GCCAGACTGGATGGCAGCAGCGGATCCCTGGAGCCCGGAGAAAAGCCTTA |
| | | CAAATGCCCCGAGTGCGGCAAGTCCTTCAGCCAGCTGGCTCATCTGAGAG |
| | | CTCATCAAAGGACCCACACCGGCGAGAAGCCCTATAAGTGCCCCGAGTGC |
| | | GGAAAATCCTTCTCCCAGAGCAGCAATCTCGTCAGACACCAGAGGACCCA |
| | | CACCGGCGAGAAACCTTACAAGTGTCCCGAATGTGGAAAGTCCTTCTCCC |
| | | AAAAGAGCTCTCTGATCGCCCATCAGAGAACACATACCGGCGAAAAACCC |
| | | TACAAGTGCCCCGAGTGTGGCAAAAGCTTTTCCACCACCGGCAATCTGAC |
| | | CGTGCATCAAAGAACCCACACCGGCGAAAAACCCTACAAATGCCCCGAGT |
| | | GTGGCAAATCCTTCTCCGACCCCGGCCATCTGGTGAGGCACCAGAGGACA |
| | | CACACCGGCGAGAAACCTTATAAATGTCCCGAATGCGGCAAGTCCTTTAG |
| | | CACCAGCGGCTCTCTGGTGAGACATCAGAGGACACATACCGGCGAAAAGC |
| | | CTTACAAGTGTCCCGAGTGTGGCAAAAGCTTCAGCCAGAACAGCACACTG |
| | | ACAGAGCATCAGAGAACCCATACCGGCAAAAAGACCAGCGCTAGCGGCAG |
| | | CGGCGGCGGCAGCGGCGGCAAGCGGCCCGCCGCCACCAAGAAGGCCGGCC |
| | | AGGCCAAGAAGAAGAAGGGCAGCTACCCCTACGACGTGCCCGACTACGCC |
| | | TGAGCGGCCGCTTAATTAAGCTGCCTTCTGCGGGGCTTGCCTTCTGGCCA |
| | | TGCCCTTCTTCTCTCCCTTGCACCTGTACCTCTTGGTCTTTGAATAAAGC |
| | | CTGAGTAGGAAGTCTAGAAAAAAAAAAAAAAAAAAAAAAAAAAAAAAAAA |
| | | AAAAAAAAAAAAAAAAAAAAAAAAAAAAAAAAAAAAAAAAAAAAAAA |
| MR- | G9A-CXCL1 | AGGAAATAAGAGAGAAAAGAAGAGTAAGAAGAAATATAAGAGCCACCATG |
| 29904 | ZF5 SP6 | GCCCCCAAGAAGAAGCGGAAGGTGGGCATCCACGGCGTGCCCGCCGCCTC |
| (SEQ ID | | GGGCGGGGGTGGCTCAGGAAATAGGGCTATCAGAACCGAGAAGATCATCT |
| NO: 225) | | GTAGGGACGTGGCTAGAGGCTACGAGAACGTGCCCATTCCTTGCGTGAAT |
| | | GGCGTGGATGGCGAACCTTGCCCCGAGGACTACAAATACATCTCCGAGAA |
| | | CTGCGAAACCAGCACAATGAACATCGACAGAAACATCACCCACCTCCAGC |
| | | ACTGCACATGTGTGGATGACTGCTCCTCCAGCAACTGTCTGTGCGGCCAG |
| | | CTCTCCATCAGATGCTGGTACGACAAGGACGGCAGACTGCTGCAAGAGTT |
| | | CAACAAGATCGAACCCCCTCTCATCTTCGAGTGTAACCAAGCTTGCAGCT |
| | | GCTGGAGAAACTGCAAGAATAGAGTGGTCCAGAGCGGCATCAAGGTGAGA |
| | | CTGCAACTGTACAGAACCGCCAAGATGGGATGGGGAGTGAGGGCTCTGCA |
| | | AACCATTCCCCAAGGCACCTTCATCTGCGAATACGTGGGCGAACTGATCT |
| | | CCGACGCCGAAGCTGACGTGAGAGAGGACGACAGCTATCTCTTCGATCTG |
| | | GACAATAAGGACGGCGAGGTGTACTGCATCGACGCTAGATATTACGGCAA |
| | | CATCTCTAGATTCATCAACCACCTCTGCGATCCCAACATCATTCCCGTGA |
| | | GGGTGTTCATGCTGCACCAAGATCTGAGGTTCCCTAGAATCGCCTTCTTC |
| | | AGCTCTAGAGACATCAGAACCGGCGAGGAGCTGGGCTTCGATTACGGCGA |
| | | TAGATTCTGGGACATCAAGTCCAAGTACTTCACATGCCAGTGCGGCAGCG |
| | | AGAAGTGTAAGCACAGCGCTGAGGCCATTGCTCTGGAGCAGTCTAGACTG |
| | | GCCAGACTGGATGGCAGCAGCGGATCCCTGGAGCCCGGCGAAAAGCCTTA |
| | | CAAGTGCCCCGAGTGTGGCAAATCCTTTAGCACCACCGGAAATCTGACCG |
| | | TCCACCAGAGAACACATACCGGCGAGAAACCCTACAAGTGTCCCGAGTGC |
| | | GGCAAATCCTTCAGCCAGCTGGCCCATCTGAGAGCCCATCAAAGGACCCA |
| | | TACCGGCGAGAAACCTTACAAGTGTCCCGAATGTGGAAAGTCCTTTAGCA |
| | | GCCCCGCCGATCTGACAAGACATCAAAGAACCCACACCGGCGAGAAGCCC |
| | | TATAAATGTCCCGAGTGTGGAAAGTCCTTCAGCCAGAGCGGCAATCTGAC |
| | | CGAGCATCAAAGAACCCATACCGGCGAAAAGCCCTATAAGTGCCCCGAAT |
| | | GCGGAAAAAGCTTCTCCACAAGCGGCGAGCTGGTGAGACACCAAAGGACA |
| | | CATACCGGCGAAAAGCCTTATAAATGCCCCGAGTGCGGCAAGAGCTTCTC |
| | | TAGAAAGGACAATCTGAAGAACCACCAAAGAACACACACCGGCGAGAAGC |
| | | CCTACAAATGCCCCGAGTGCGGCAAGAGCTTTAGCCAGTCCAGCAACCTC |
| | | GTGAGACATCAGAGGACACATACCGGAAAAAAGACCAGCGCTAGCGGCAG |
| | | CGGCGGCGGCAGCGGCGGCAAGCGGCCCGCCGCCACCAAGAAGGCCGGCC |
| | | AGGCCAAGAAGAAGAAGGGCAGCTACCCCTACGACGTGCCCGACTACGCC |
| | | TGAGCGGCCGCTTAATTAAGCTGCCTTCTGCGGGGCTTGCCTTCTGGCCA |
| | | TGCCCTTCTTCTCTCCCTTGCACCTGTACCTCTTGGTCTTTGAATAAAGC |
| | | CTGAGTAGGAAGTCTAGAGAAAAAAAAAAAAAAAAAAAAAAAAAAAAAAA |
| | | AAAAAAAAAAAAAAAAAAAAAAAAAAAAAAAAAAAAAAAAAAAAAAAAA |
| MR- | CXCL1 ZF4- | AGGAAATAAGAGAGAAAAGAAGAGTAAGAAGAAATATAAGAGCCACCATG |
| 29890 | HDAC8 SP6 | GCCCCCAAGAAGAAGCGGAAGGTGGGCATCCACGGCGTGCCCGCCGCCGG |
| (SEQ ID | | CAGCAGCGGATCCCTGGAGCCCGGAGAAAAGCCTTACAAATGCCCCGAGT |
| NO: 226) | | GCGGCAAGTCCTTCAGCCAGCTGGCTCATCTGAGAGCTCATCAAAGGACC |
| | | CACACCGGCGAGAAGCCCTATAAGTGCCCCGAGTGCGGAAAATCCTTCTC |
| | | CCAGAGCAGCAATCTCGTCAGACACCAGAGGACCCACACCGGCGAGAAAC |
| | | CTTACAAGTGTCCCGAATGTGGAAAGTCCTTCTCCCAAAAGAGCTCTCTG |
| | | ATCGCCCATCAGAGAACACATACCGGCGAAAAACCCTACAAGTGCCCCGA |
| | | GTGTGGCAAAAGCTTTTCCACCACCGGCAATCTGACCGTGCATCAAAGAA |
| | | CCCACACCGGCGAAAAACCCTACAAATGCCCCGAGTGTGGCAAATCCTTC |
| | | TCCGACCCCGGCCATCTGGTGAGGCACCAGAGGACACACACCGGCGAGAA |
| | | ACCTTATAAATGTCCCGAATGCGGCAAGTCCTTTAGCACCAGCGGCTCTC |
| | | TGGTGAGACATCAGAGGACACATACCGGCGAAAAGCCTTACAAGTGTCCC |
| | | GAGTGTGGCAAAAGCTTCAGCCAGAACAGCACACTGACAGAGCATCAGAG |
| | | AACCCATACCGGCAAAAAGACCAGCGCTAGCGGCAGCGGCGGCGGCAGCG |
| | | GCGGCGAGGAGCCCGAGGAGCCCGCCGATAGCGGACAATCTCTGGTGCCC |
| | | GTCTACATCTACAGCCCCGAATATGTGAGCATGTGTGATTCCCTCGCCAA |
| | | GATCCCTAAGAGAGCCAGCATGGTGCATTCTCTGATCGAGGCCTACGCTC |
| | | TGCATAAGCAAATGAGGATCGTGAAGCCCAAGGTCGCCAGCATGGAAGAG |
| | | ATGGCCACCTTTCACACCGATGCCTACCTCCAACATCTCCAGAAGGTGTC |
| | | CCAAGAGGGCGACGACGACCACCCCGACTCCATTGAGTACGGACTGGGCT |
| | | ATGATTGCCCCGCCACCGAGGGCATCTTTGACTATGCCGCCGCTATCGGC |
| | | GGAGCTACCATCACAGCCGCCCAGTGTCTGATTGATGGCATGTGCAAGGT |
| | | CGCCATCAACTGGTCCGGAGGCTGGCATCATGCCAAGAAGGATGAGGCCT |
| | | CCGGCTTCTGTTATCTGAATGACGCCGTGCTGGGCATTCTGAGACTGAGG |
| | | AGGAAATTCGAGAGGATTCTGTACGTGGATCTGGATCTGCATCACGGAGA |
| | | TGGAGTCGAAGATGCCTTCAGCTTCACCAGCAAGGTGATGACAGTCTCTC |
| | | TGCACAAGTTCTCCCCCGGCTTCTTTCCCGGAACCGGCGACGTGTCCGAC |
| | | GTGGGACTGGGCAAGGGAAGGTACTACAGCGTGAACGTGCCCATTCAAGA |
| | | CGGCATCCAAGACGAGAAGTACTACCAGATCTGCGAGTCCGTGCTCAAGG |
| | | AGGTCTACCAAGCCTTCAATCCTAAGGCTGTCGTGCTCCAACTGGGAGCT |
| | | GATACCATTGCTGGCGATCCCATGTGCAGCTTCAATATGACACCCGTCGG |
| | | AATCGGCAAGTGCCTCAAGTACATCCTCCAGTGGCAGCTCGCCACCCTCA |
| | | TTCTCGGAGGAGGCGGATACAATCTGGCTAATACCGCCAGATGCTGGACC |
| | | TATCTGACCGGCGTGATTCTGGGCAAAACACTGAGCAGCGAAATCCCCGA |
| | | CCACGAGTTTTTCACCGCTTACGGCCCCGACTACGTGCTGGAGATCACCC |
| | | CCAGCTGCAGACCCGATAGAAACGAACCCCATAGAATCCAGCAAATTCTG |
| | | AACTATATCAAGGGCAACCTCAAGCACGTCGTGGGAGGTGGCGGATCGGG |
| | | AAAGCGGCCCGCCGCCACCAAGAAGGCCGGTCAGGCCAAGAAGAAGAAGG |
| | | GCAGCTACCCCTACGACGTGCCCGACTACGCCTGAGCGGCCGCTTAATTA |
| | | AGCTGCCTTCTGCGGGGCTTGCCTTCTGGCCATGCCCTTCTTCTCTCCCT |
| | | TGCACCTGTACCTCTTGGTCTTTGAATAAAGCCTGAGTAGGAAGTCTAGA |
| | | AAAAAAAAAAAAAAAAAAAAAAAAAAAAAAAAAAAAAAAAAAAAAAAAAA |
| | | AAAAAAAAAAAAAAAAAAAAAAAAAAAAA |
| MR- | G9A-CXCL1 | AGGAAATAAGAGAGAAAAGAAGAGTAAGAAGAAATATAAGAGCCACCATG |
| 29886 | ZF6 SP6 | GCCCCCAAGAAGAAGCGGAAGGTGGGCATCCACGGCGTGCCCGCCGCCTC |
| (SEQ ID | | GGGCGGGGGTGGCTCAGGAAATAGGGCTATCAGAACCGAGAAGATCATCT |
| NO: 227) | | GTAGGGACGTGGCTAGAGGCTACGAGAACGTGCCCATTCCTTGCGTGAAT |
| | | GGCGTGGATGGCGAACCTTGCCCCGAGGACTACAAATACATCTCCGAGAA |
| | | CTGCGAAACCAGCACAATGAACATCGACAGAAACATCACCCACCTCCAGC |
| | | ACTGCACATGTGTGGATGACTGCTCCTCCAGCAACTGTCTGTGCGGCCAG |
| | | CTCTCCATCAGATGCTGGTACGACAAGGACGGCAGACTGCTGCAAGAGTT |
| | | CAACAAGATCGAACCCCCTCTCATCTTCGAGTGTAACCAAGCTTGCAGCT |
| | | GCTGGAGAAACTGCAAGAATAGAGTGGTCCAGAGCGGCATCAAGGTGAGA |
| | | CTGCAACTGTACAGAACCGCCAAGATGGGATGGGGAGTGAGGGCTCTGCA |
| | | AACCATTCCCCAAGGCACCTTCATCTGCGAATACGTGGGCGAACTGATCT |
| | | CCGACGCCGAAGCTGACGTGAGAGAGGACGACAGCTATCTCTTCGATCTG |
| | | GACAATAAGGACGGCGAGGTGTACTGCATCGACGCTAGATATTACGGCAA |
| | | CATCTCTAGATTCATCAACCACCTCTGCGATCCCAACATCATTCCCGTGA |
| | | GGGTGTTCATGCTGCACCAAGATCTGAGGTTCCCTAGAATCGCCTTCTTC |
| | | AGCTCTAGAGACATCAGAACCGGCGAGGAGCTGGGCTTCGATTACGGCGA |
| | | TAGATTCTGGGACATCAAGTCCAAGTACTTCACATGCCAGTGCGGCAGCG |
| | | AGAAGTGTAAGCACAGCGCTGAGGCCATTGCTCTGGAGCAGTCTAGACTG |
| | | GCCAGACTGGATGGCAGCAGCGGATCCCTGGAGCCCGGCGAAAAGCCTTA |
| | | CAAGTGTCCCGAGTGCGGAAAGAGCTTCAGCAGAGCCGATAATCTGACCG |
| | | AGCACCAAAGGACCCACACCGGAGAGAAGCCTTATAAGTGTCCCGAATGC |
| | | GGCAAAAGCTTTTCTAGAAGCGATCATCTGACCAACCACCAGAGGACACA |
| | | CACCGGAGAAAAACCTTACAAATGCCCCGAGTGCGGCAAAAGCTTCTCCC |
| | | AGAGCAGCAATCTGGTGAGACACCAAAGGACCCACACCGGCGAAAAACCC |
| | | TATAAATGCCCCGAATGTGGCAAGAGCTTTAGCACATCCGGCGAGCTGGT |
| | | GAGGCATCAAAGAACACATACCGGCGAGAAGCCCTACAAGTGCCCCGAGT |
| | | GTGGAAAAAGCTTCAGCACCCACCTCGATCTGATCAGACACCAGAGGACC |
| | | CATACCGGAGAGAAACCCTACAAATGTCCCGAGTGCGGAAAGTCCTTTAG |
| | | CCAGCTGGCCCATCTGAGAGCTCATCAAAGGACACACACCGGCGAGAAGC |
| | | CTTACAAGTGTCCCGAGTGCGGAAAATCCTTCTCCCAACTGGCCCATCTG |
| | | AGGGCCCACCAGAGAACCCACACCGGCAAAAAGACCTCCGCTAGCGGCAG |
| | | CGGCGGCGGCAGCGGCGGCAAGCGGCCCGCCGCCACCAAGAAGGCCGGCC |
| | | AGGCCAAGAAGAAGAAGGGCAGCTACCCCTACGACGTGCCCGACTACGCC |
| | | TGAGCGGCCGCTTAATTAAGCTGCCTTCTGCGGGGCTTGCCTTCTGGCCA |
| | | TGCCCTTCTTCTCTCCCTTGCACCTGTACCTCTTGGTCTTTGAATAAAGC |
| | | CTGAGTAGGAAGTCTAGAAAAAAAAAAAAAAAAAA |
| MR- | G9A-CXCL1 | AGGAAATAAGAGAGAAAAGAAGAGTAAGAAGAAATATAAGAGCCACCATG |
| 29873 | ZF3 SP6 | GCCCCCAAGAAGAAGCGGAAGGTGGGCATCCACGGCGTGCCCGCCGCCTC |
| (SEQ ID | | GGGCGGGGGTGGCTCAGGAAATAGGGCTATCAGAACCGAGAAGATCATCT |
| NO: 228) | | GTAGGGACGTGGCTAGAGGCTACGAGAACGTGCCCATTCCTTGCGTGAAT |
| | | GGCGTGGATGGCGAACCTTGCCCCGAGGACTACAAATACATCTCCGAGAA |
| | | CTGCGAAACCAGCACAATGAACATCGACAGAAACATCACCCACCTCCAGC |
| | | ACTGCACATGTGTGGATGACTGCTCCTCCAGCAACTGTCTGTGCGGCCAG |
| | | CTCTCCATCAGATGCTGGTACGACAAGGACGGCAGACTGCTGCAAGAGTT |
| | | CAACAAGATCGAACCCCCTCTCATCTTCGAGTGTAACCAAGCTTGCAGCT |
| | | GCTGGAGAAACTGCAAGAATAGAGTGGTCCAGAGCGGCATCAAGGTGAGA |
| | | CTGCAACTGTACAGAACCGCCAAGATGGGATGGGGAGTGAGGGCTCTGCA |
| | | AACCATTCCCCAAGGCACCTTCATCTGCGAATACGTGGGCGAACTGATCT |
| | | CCGACGCCGAAGCTGACGTGAGAGAGGACGACAGCTATCTCTTCGATCTG |
| | | GACAATAAGGACGGCGAGGTGTACTGCATCGACGCTAGATATTACGGCAA |
| | | CATCTCTAGATTCATCAACCACCTCTGCGATCCCAACATCATTCCCGTGA |
| | | GGGTGTTCATGCTGCACCAAGATCTGAGGTTCCCTAGAATCGCCTTCTTC |
| | | AGCTCTAGAGACATCAGAACCGGCGAGGAGCTGGGCTTCGATTACGGCGA |
| | | TAGATTCTGGGACATCAAGTCCAAGTACTTCACATGCCAGTGCGGCAGCG |
| | | AGAAGTGTAAGCACAGCGCTGAGGCCATTGCTCTGGAGCAGTCTAGACTG |
| | | GCCAGACTGGATGGCAGCAGCGGATCCCTGGAGCCCGGCGAAAAACCCTA |
| | | TAAATGCCCCGAGTGTGGCAAGAGCTTTTCCGACCCCGGACACCTCGTGA |
| | | GGCATCAGAGAACACATACCGGCGAGAAACCCTACAAGTGCCCCGAATGC |
| | | GGCAAATCCTTCTCTAGAAAGGACAATCTGAAAAACCATCAAAGAACCCA |
| | | TACCGGCGAGAAGCCCTATAAATGTCCCGAGTGTGGAAAGAGCTTCAGCC |
| | | ACAAGAACGCTCTGCAGAACCATCAGAGGACCCATACCGGCGAAAAGCCT |
| | | TATAAGTGCCCCGAGTGCGGAAAATCCTTTTCTAGAAGGGACGAGCTGAA |
| | | TGTGCACCAAAGGACACATACCGGAGAGAAACCCTACAAATGCCCCGAGT |
| | | GCGGCAAGTCCTTCAGCACCTCCGGCAATCTGGTGAGGCACCAAAGGACA |
| | | CACACCGGCGAAAAACCTTACAAGTGTCCCGAGTGCGGAAAAAGCTTTTC |
| | | CCAGAACAGCACACTGACCGAACACCAAAGGACCCACACCGGAGAGAAAC |
| | | CTTATAAATGTCCCGAGTGTGGAAAGTCCTTTAGCCAGTCCGGCAATCTG |
| | | ACAGAGCATCAAAGAACCCACACCGGCAAAAAGACCTCCGCTAGCGGCAG |
| | | CGGCGGCGGCAGCGGCGGCAAGCGGCCCGCCGCCACCAAGAAGGCCGGCC |
| | | AGGCCAAGAAGAAGAAGGGCAGCTACCCCTACGACGTGCCCGACTACGCC |
| | | TGAGCGGCCGCTTAATTAAGCTGCCTTCTGCGGGGCTTGCCTTCTGGCCA |
| | | TGCCCTTCTTCTCTCCAAAAAAAAAAAAAAAAAAAAAAAAAAAAAAAAAA |
| | | AAAAAAAAAAAAAAAAAAAAAAAAAAAAAAA |
| MR- | G9A-CXCL1 | AGGAAATAAGAGAGAAAAGAAGAGTAAGAAGAAATATAAGAGCCACCATG |
| 29872 | ZF2 SP6 | GCCCCCAAGAAGAAGCGGAAGGTGGGCATCCACGGCGTGCCCGCCGCCTC |
| (SEQ ID | | GGGCGGGGGTGGCTCAGGAAATAGGGCTATCAGAACCGAGAAGATCATCT |
| NO: 229) | | GTAGGGACGTGGCTAGAGGCTACGAGAACGTGCCCATTCCTTGCGTGAAT |
| | | GGCGTGGATGGCGAACCTTGCCCCGAGGACTACAAATACATCTCCGAGAA |
| | | CTGCGAAACCAGCACAATGAACATCGACAGAAACATCACCCACCTCCAGC |
| | | ACTGCACATGTGTGGATGACTGCTCCTCCAGCAACTGTCTGTGCGGCCAG |
| | | CTCTCCATCAGATGCTGGTACGACAAGGACGGCAGACTGCTGCAAGAGTT |
| | | CAACAAGATCGAACCCCCTCTCATCTTCGAGTGTAACCAAGCTTGCAGCT |
| | | GCTGGAGAAACTGCAAGAATAGAGTGGTCCAGAGCGGCATCAAGGTGAGA |
| | | CTGCAACTGTACAGAACCGCCAAGATGGGATGGGGAGTGAGGGCTCTGCA |
| | | AACCATTCCCCAAGGCACCTTCATCTGCGAATACGTGGGCGAACTGATCT |
| | | CCGACGCCGAAGCTGACGTGAGAGAGGACGACAGCTATCTCTTCGATCTG |
| | | GACAATAAGGACGGCGAGGTGTACTGCATCGACGCTAGATATTACGGCAA |
| | | CATCTCTAGATTCATCAACCACCTCTGCGATCCCAACATCATTCCCGTGA |
| | | GGGTGTTCATGCTGCACCAAGATCTGAGGTTCCCTAGAATCGCCTTCTTC |
| | | AGCTCTAGAGACATCAGAACCGGCGAGGAGCTGGGCTTCGATTACGGCGA |
| | | TAGATTCTGGGACATCAAGTCCAAGTACTTCACATGCCAGTGCGGCAGCG |
| | | AGAAGTGTAAGCACAGCGCTGAGGCCATTGCTCTGGAGCAGTCTAGACTG |
| | | GCCAGACTGGATGGCAGCAGCGGATCCCTGGAGCCCGGCGAAAAACCCTA |
| | | TAAGTGCCCCGAGTGCGGCAAGAGCTTTAGCGATCCCGGCCATCTGGTGA |
| | | GGCATCAGAGGACCCACACCGGCGAAAAGCCTTACAAATGCCCCGAGTGT |
| | | GGAAAAAGCTTCAGCAGAAGCGATCATCTGACCACCCATCAGAGGACACA |
| | | TACCGGCGAGAAGCCTTATAAATGCCCCGAATGTGGAAAGAGCTTCTCCA |
| | | GAAGCGACCATCTGACCAACCACCAGAGGACCCATACCGGAGAAAAACCT |
| | | TACAAATGCCCCGAGTGTGGAAAGTCCTTCAGCTCCCCCGCCGATCTGAC |
| | | AAGACATCAGAGAACCCACACCGGCGAAAAACCTTATAAATGTCCCGAGT |
| | | GTGGCAAAAGCTTCTCCGACAAGAAGGATCTGACAAGACACCAAAGGACC |
| | | CACACCGGCGAGAAACCTTATAAATGTCCCGAATGCGGAAAAAGCTTTAG |
| | | CAGAAACGACGCTCTGACCGAACACCAGAGAACACATACCGGAGAGAAAC |
| | | CCTATAAATGTCCCGAGTGCGGAAAATCCTTCAGCACCACCGGCGCTCTG |
| | | ACAGAGCATCAGAGGACACACACCGGCAAAAAGACCTCCGCTAGCGGCAG |
| | | CGGCGGCGGCAGCGGCGGCAAGCGGCCCGCCGCCACCAAGAAGGCCGGCC |
| | | AGGCCAAGAAGAAGAAGGGCAGCTACCCCTACGACGTGCCCGACTACGCC |
| | | TGAGCGGCCGCTTAATTAAGCTGCCTTCTGCGGGGCTTGCCTTCTGGCCA |
| | | TGCCCTTCTTCTCTCCCTTGCACCTGTACCTCTTGGTCTTTGAATAAAGC |
| | | CTGAGTAGGAAGTCTAGAAAAAAAAAAAAAAAAAAAAAAAAAAAAAAAAA |
| | | AAAAAAAAAAAAAAAAAAAAAAAAAAAAAAAAAAAAAAAAAAAAAAA |
| MR- | G9A-CXCL1 | AGGAAATAAGAGAGAAAAGAAGAGTAAGAAGAAATATAAGAGCCACCATG |
| 29871 | ZF1 SP6 | GCCCCCAAGAAGAAGCGGAAGGTGGGCATCCACGGCGTGCCCGCCGCCTC |
| (SEQ ID | | GGGCGGGGGTGGCTCAGGAAATAGGGCTATCAGAACCGAGAAGATCATCT |
| NO: 230) | | GTAGGGACGTGGCTAGAGGCTACGAGAACGTGCCCATTCCTTGCGTGAAT |
| | | GGCGTGGATGGCGAACCTTGCCCCGAGGACTACAAATACATCTCCGAGAA |
| | | CTGCGAAACCAGCACAATGAACATCGACAGAAACATCACCCACCTCCAGC |
| | | ACTGCACATGTGTGGATGACTGCTCCTCCAGCAACTGTCTGTGCGGCCAG |
| | | CTCTCCATCAGATGCTGGTACGACAAGGACGGCAGACTGCTGCAAGAGTT |
| | | CAACAAGATCGAACCCCCTCTCATCTTCGAGTGTAACCAAGCTTGCAGCT |
| | | GCTGGAGAAACTGCAAGAATAGAGTGGTCCAGAGCGGCATCAAGGTGAGA |
| | | CTGCAACTGTACAGAACCGCCAAGATGGGATGGGGAGTGAGGGCTCTGCA |
| | | AACCATTCCCCAAGGCACCTTCATCTGCGAATACGTGGGCGAACTGATCT |
| | | CCGACGCCGAAGCTGACGTGAGAGAGGACGACAGCTATCTCTTCGATCTG |
| | | GACAATAAGGACGGCGAGGTGTACTGCATCGACGCTAGATATTACGGCAA |
| | | CATCTCTAGATTCATCAACCACCTCTGCGATCCCAACATCATTCCCGTGA |
| | | GGGTGTTCATGCTGCACCAAGATCTGAGGTTCCCTAGAATCGCCTTCTTC |
| | | AGCTCTAGAGACATCAGAACCGGCGAGGAGCTGGGCTTCGATTACGGCGA |
| | | TAGATTCTGGGACATCAAGTCCAAGTACTTCACATGCCAGTGCGGCAGCG |
| | | AGAAGTGTAAGCACAGCGCTGAGGCCATTGCTCTGGAGCAGTCTAGACTG |
| | | GCCAGACTGGATGGCAGCAGCGGATCCCTGGAGCCCGGCGAAAAGCCTTA |
| | | CAAATGTCCCGAATGCGGAAAGAGCTTCAGCAGAGCCGACAATCTGACCG |
| | | AACATCAGAGAACCCATACCGGAGAAAAACCTTACAAATGTCCCGAGTGC |
| | | GGCAAAAGCTTCTCCCAAGCCGGACATCTGGCCAGCCACCAAAGGACACA |
| | | TACCGGCGAGAAACCCTACAAGTGCCCCGAGTGCGGCAAGTCCTTCTCTA |
| | | GATCCGATGAGCTGGTCAGACATCAGAGAACCCATACCGGCGAGAAGCCT |
| | | TATAAGTGCCCCGAATGTGGCAAGTCCTTCAGCCAGAGAGCTCATCTGGA |
| | | GAGGCATCAAAGAACACACACCGGAGAGAAACCTTACAAGTGTCCCGAGT |
| | | GTGGAAAGAGCTTCTCCAGAAGGGACGAGCTGAACGTCCACCAAAGAACC |
| | | CATACCGGCGAAAAGCCCTATAAATGCCCCGAGTGTGGAAAATCCTTTTC |
| | | TAGATCCGACCATCTGACAACCCACCAGAGGACCCATACCGGAGAGAAGC |
| | | CCTACAAATGCCCCGAGTGTGGAAAAAGCTTCTCTAGAAACGATGCTCTG |
| | | ACAGAGCACCAAAGGACCCACACCGGCAAAAAGACCAGCGCTAGCGGCAG |
| | | CGGCGGCGGCAGCGGCGGCAAGCGGCCCGCCGCCACCAAGAAGGCCGGCC |
| | | AGGCCAAGAAGAAGAAGGGCAGCTACCCCTACGACGTGCCCGACTACGCC |
| | | TGAGCGGCCGCTTAATTAAGCTGCCTTCTGCGGGGCTTGCCTTCTGGCCA |
| | | TGCCCTTCTTCTCTCCCTTGCACCTGTACCTCTTGGTCTTTGAATAAAGC |
| | | CTGAGTAGGAAGTCTAGAAAAAAAAAAAAAAAAAAAAAAAAAAAAAAAAA |
| | | AAAAAAAAAAAAAAAAAAAAAAAAAAAAAAAAAAAAAAAAAAAAAAA |
| MR- | CXCL1 ZF2- | AGGAAATAAGAGAGAAAAGAAGAGTAAGAAGAAATATAAGAGCCACCATG |
| 29870 | DNMT3a-3L | GCCCCCAAGAAGAAGCGGAAGGTGGGCATCCACGGCGTGCCCGCCGCCGG |
| (SEQ ID | SP6 | CAGCAGCGGATCCCTGGAGCCCGGCGAAAAACCCTATAAGTGCCCCGAGT |
| NO: 231) | | GCGGCAAGAGCTTTAGCGATCCCGGCCATCTGGTGAGGCATCAGAGGACC |
| | | CACACCGGCGAAAAGCCTTACAAATGCCCCGAGTGTGGAAAAAGCTTCAG |
| | | CAGAAGCGATCATCTGACCACCCATCAGAGGACACATACCGGCGAGAAGC |
| | | CTTATAAATGCCCCGAATGTGGAAAGAGCTTCTCCAGAAGCGACCATCTG |
| | | ACCAACCACCAGAGGACCCATACCGGAGAAAAACCTTACAAATGCCCCGA |
| | | GTGTGGAAAGTCCTTCAGCTCCCCCGCCGATCTGACAAGACATCAGAGAA |
| | | CCCACACCGGCGAAAAACCTTATAAATGTCCCGAGTGTGGCAAAAGCTTC |
| | | TCCGACAAGAAGGATCTGACAAGACACCAAAGGACCCACACCGGCGAGAA |
| | | ACCTTATAAATGTCCCGAATGCGGAAAAAGCTTTAGCAGAAACGACGCTC |
| | | TGACCGAACACCAGAGAACACATACCGGAGAGAAACCCTATAAATGTCCC |
| | | GAGTGCGGAAAATCCTTCAGCACCACCGGCGCTCTGACAGAGCATCAGAG |
| | | GACACACACCGGCAAAAAGACCTCCGCTAGCGGCAGCGGCGGCGGCAGCG |
| | | GCGGCAACCACGACCAGGAGTTCGACCCCCCCAAGGTGTACCCCCCCGTG |
| | | CCCGCCGAGAAGCGGAAGCCCATCCGGGTGCTGAGCCTGTTCGACGGCAT |
| | | CGCCACCGGCCTGCTGGTGCTGAAGGACCTGGGCATCCAGGTGGACCGGT |
| | | ACATCGCCAGCGAGGTGTGCGAGGACAGCATCACCGTGGGCATGGTGCGG |
| | | CACCAGGGCAAGATCATGTACGTGGGCGACGTGCGGAGCGTGACCCAGAA |
| | | GCACATCCAGGAGTGGGGCCCCTTCGACCTGGTGATCGGCGGCAGCCCCT |
| | | GCAACGACCTGAGCATCGTGAACCCCGCCCGGAAGGGCCTGTACGAGGGC |
| | | ACCGGCCGGCTGTTCTTCGAGTTCTACCGGCTGCTGCACGACGCCCGGCC |
| | | CAAGGAGGGCGACGACCGGCCCTTCTTCTGGCTGTTCGAGAACGTGGTGG |
| | | CCATGGGCGTGAGCGACAAGCGGGACATCAGCCGGTTCCTGGAGAGCAAC |
| | | CCCGTGATGATCGACGCCAAGGAGGTGAGCGCCGCCCACCGGGCCCGGTA |
| | | CTTCTGGGGCAACCTGCCCGGCATGAACCGGCCCCTGGCCAGCACCGTGA |
| | | ACGACAAGCTGGAGCTGCAGGAGTGCCTGGAGCACGGCCGGATCGCCAAG |
| | | TTCAGCAAGGTGCGGACCATCACCACCCGGAGCAACAGCATCAAGCAGGG |
| | | CAAGGACCAGCACTTCCCCGTGTTCATGAACGAGAAGGAGGACATCCTGT |
| | | GGTGCACCGAGATGGAGCGGGTGTTCGGCTTCCCCGTGCACTACACCGAC |
| | | GTGAGCAACATGAGCCGGCTGGCCCGGCAGCGGCTGCTGGGCCGGAGCTG |
| | | GAGCGTGCCCGTGATCCGGCACCTGTTCGCCCCCCTGAAGGAGTACTTCG |
| | | CCTGCGTGAGCAGCGGCAACAGCAACGCCAACAGCCGGGGCCCCAGCTTC |
| | | AGCAGCGGCCTGGTGCCCCTGAGCCTGCGGGGCAGCCACATGAATCCTCT |
| | | GGAGATGTTCGAGACAGTGCCCGTGTGGAGAAGGCAACCCGTGAGGGTGC |
| | | TGAGCCTCTTCGAGGACATTAAGAAGGAGCTGACCTCTCTGGGCTTTCTG |
| | | GAATCCGGCAGCGACCCCGGCCAGCTGAAACACGTGGTGGACGTGACCGA |
| | | CACAGTGAGGAAGGACGTGGAAGAGTGGGGCCCCTTTGACCTCGTGTATG |
| | | GAGCCACACCTCCTCTCGGCCACACATGCGATAGGCCTCCCAGCTGGTAT |
| | | CTCTTCCAGTTCCACAGACTGCTCCAGTACGCCAGACCTAAGCCCGGCAG |
| | | CCCCAGACCCTTCTTCTGGATGTTCGTGGACAATCTGGTGCTGAACAAGG |
| | | AGGATCTGGATGTGGCCAGCAGATTTCTGGAGATGGAACCCGTGACAATC |
| | | CCCGACGTGCATGGCGGCTCTCTGCAGAACGCCGTGAGAGTGTGGTCCAA |
| | | CATCCCCGCCATTAGAAGCAGACACTGGGCTCTGGTGAGCGAGGAGGAAC |
| | | TGTCTCTGCTGGCCCAGAATAAGCAGTCCTCCAAGCTGGCCGCCAAGTGG |
| | | CCCACCAAGCTGGTGAAGAACTGCTTTCTGCCTCTGAGGGAGTATTTCAA |
| | | GTATTTCAGCACCGAACTGACCAGCAGCCTGAGCGGCGGCAAGCGGCCCG |
| | | CCGCCACCAAGAAGGCCGGCCAGGCCAAGAAGAAGAAGGGCAGCTACCCC |
| | | TACGACGTGCCCGACTACGCCTGAGCGGCCGCTTAATTAAGCTGCCTTCT |
| | | GCGGGGCTTGCCTTCTGGCCATGCCCTTCTTCTCTCCCTTGCACCTGTAC |
| | | CTCTTGGTCTTTGAATAAAGCCTGAGTAGGAAGTCTAGAAAAAAAAAAAA |
| | | AAAAAAAAAAAAAAAAAAAAAAAAAAAAAAAAAAAAAAAAAAAAAAAAAA |
| | | AAAAAAAAAAAAAAAAAA |
| MR- | CXCL1 ZF6- | AGGAAATAAGAGAGAAAAGAAGAGTAAGAAGAAATATAAGAGCCACCATG |
| 29867 | HDAC8 SP6 | GCCCCCAAGAAGAAGCGGAAGGTGGGCATCCACGGCGTGCCCGCCGCCGG |
| (SEQ ID | | CAGCAGCGGATCCCTGGAGCCCGGCGAAAAGCCTTACAAGTGTCCCGAGT |
| NO: 232) | | GCGGAAAGAGCTTCAGCAGAGCCGATAATCTGACCGAGCACCAAAGGACC |
| | | CACACCGGAGAGAAGCCTTATAAGTGTCCCGAATGCGGCAAAAGCTTTTC |
| | | TAGAAGCGATCATCTGACCAACCACCAGAGGACACACACCGGAGAAAAAC |
| | | CTTACAAATGCCCCGAGTGCGGCAAAAGCTTCTCCCAGAGCAGCAATCTG |
| | | GTGAGACACCAAAGGACCCACACCGGCGAAAAACCCTATAAATGCCCCGA |
| | | ATGTGGCAAGAGCTTTAGCACATCCGGCGAGCTGGTGAGGCATCAAAGAA |
| | | CACATACCGGCGAGAAGCCCTACAAGTGCCCCGAGTGTGGAAAAAGCTTC |
| | | AGCACCCACCTCGATCTGATCAGACACCAGAGGACCCATACCGGAGAGAA |
| | | ACCCTACAAATGTCCCGAGTGCGGAAAGTCCTTTAGCCAGCTGGCCCATC |
| | | TGAGAGCTCATCAAAGGACACACACCGGCGAGAAGCCTTACAAGTGTCCC |
| | | GAGTGCGGAAAATCCTTCTCCCAACTGGCCCATCTGAGGGCCCACCAGAG |
| | | AACCCACACCGGCAAAAAGACCTCCGCTAGCGGCAGCGGCGGCGGCAGCG |
| | | GCGGCGAGGAGCCCGAGGAGCCCGCCGATAGCGGACAATCTCTGGTGCCC |
| | | GTCTACATCTACAGCCCCGAATATGTGAGCATGTGTGATTCCCTCGCCAA |
| | | GATCCCTAAGAGAGCCAGCATGGTGCATTCTCTGATCGAGGCCTACGCTC |
| | | TGCATAAGCAAATGAGGATCGTGAAGCCCAAGGTCGCCAGCATGGAAGAG |
| | | ATGGCCACCTTTCACACCGATGCCTACCTCCAACATCTCCAGAAGGTGTC |
| | | CCAAGAGGGCGACGACGACCACCCCGACTCCATTGAGTACGGACTGGGCT |
| | | ATGATTGCCCCGCCACCGAGGGCATCTTTGACTATGCCGCCGCTATCGGC |
| | | GGAGCTACCATCACAGCCGCCCAGTGTCTGATTGATGGCATGTGCAAGGT |
| | | CGCCATCAACTGGTCCGGAGGCTGGCATCATGCCAAGAAGGATGAGGCCT |
| | | CCGGCTTCTGTTATCTGAATGACGCCGTGCTGGGCATTCTGAGACTGAGG |
| | | AGGAAATTCGAGAGGATTCTGTACGTGGATCTGGATCTGCATCACGGAGA |
| | | TGGAGTCGAAGATGCCTTCAGCTTCACCAGCAAGGTGATGACAGTCTCTC |
| | | TGCACAAGTTCTCCCCCGGCTTCTTTCCCGGAACCGGCGACGTGTCCGAC |
| | | GTGGGACTGGGCAAGGGAAGGTACTACAGCGTGAACGTGCCCATTCAAGA |
| | | CGGCATCCAAGACGAGAAGTACTACCAGATCTGCGAGTCCGTGCTCAAGG |
| | | AGGTCTACCAAGCCTTCAATCCTAAGGCTGTCGTGCTCCAACTGGGAGCT |
| | | GATACCATTGCTGGCGATCCCATGTGCAGCTTCAATATGACACCCGTCGG |
| | | AATCGGCAAGTGCCTCAAGTACATCCTCCAGTGGCAGCTCGCCACCCTCA |
| | | TTCTCGGAGGAGGCGGATACAATCTGGCTAATACCGCCAGATGCTGGACC |
| | | TATCTGACCGGCGTGATTCTGGGCAAAACACTGAGCAGCGAAATCCCCGA |
| | | CCACGAGTTTTTCACCGCTTACGGCCCCGACTACGTGCTGGAGATCACCC |
| | | CCAGCTGCAGACCCGATAGAAACGAACCCCATAGAATCCAGCAAATTCTG |
| | | AACTATATCAAGGGCAACCTCAAGCACGTCGTGGGAGGTGGCGGATCGGG |
| | | AAAGCGGCCCGCCGCCACCAAGAAGGCCGGTCAGGCCAAGAAGAAGAAGG |
| | | GCAGCTACCCCTACGACGTGCCCGACTACGCCTGAGCGGCCGCTTAATTA |
| | | AGCTGCCTTCTGCGGGGCTTGCCTTCTGGCCATGCCCTTCTTCTCTCCCT |
| | | TGCACCTGTACCTCTTGGTCTTTGAATAAAGCCTGAGTAGGAAGTCTAGA |
| | | AAAAAAAAAAAAAAAAAAAAAAAAAAAAAAAAAAAAAAAAAAAAAAAAAA |
| | | AAAAAAAAAAAAAAAAAAAAAAAAAAAAA |
| MR- | EZH2- | AGGAAATAAGAGAGAAAAGAAGAGTAAGAAGAAATATAAGAGCCACCATG |
| 29850 | CXCL1 ZF4 | GCCCCCAAGAAGAAGCGGAAGGTGGGCGGCAGCGGCGGCAGCGGCCAGAC |
| (SEQ ID | T7 | CGGCAAGAAGAGCGAGAAGGGCCCCGTGTGCTGGCGGAAGCGGGTGAAGA |
| NO: 233) | | GCGAGTACATGCGGCTGCGGCAGCTGAAGCGGTTCCGGCGGGCCGACGAG |
| | | GTGAAGAGCATGTTCAGCAGCAACCGGCAGAAGATCCTGGAGCGGACCGA |
| | | GATCCTGAACCAGGAGTGGAAGCAGCGGCGAATCCAGCCCGTGCACATCC |
| | | TGACCAGCGTGAGCAGCCTGCGGGGCACCCGGGAGTGCAGCGTGACCAGC |
| | | GACCTGGACTTCCCCACCCAGGTGATCCCCCTAAAGACCCTGAACGCCGT |
| | | GGCCAGCGTGCCCATCATGTACAGCTGGAGCCCCCTGCAGCAGAACTTCA |
| | | TGGTGGAGGACGAGACCGTGCTGCACAACATCCCCTACATGGGCGACGAG |
| | | GTGCTGGACCAGGACGGCACCTTCATCGAGGAGCTGATCAAGAACTACGA |
| | | CGGCAAGGTGCACGGCGACCGGGAGTGCGGCTTCATCAACGACGAGATCT |
| | | TCGTGGAGCTGGTGAACGCCCTGGGCCAGTACAACGACGACGACGACGAC |
| | | GACGACGGCGACGACCCCGAGGAGCGGGAGGAGAAGCAGAAGGACCTGGA |
| | | GGACCACCGGGACGACAAGGAGAGCCGGCCCCCCCGGAAGTTCCCCAGCG |
| | | ACAAGATCTTCGAGGCCATCAGCAGCATGTTCCCCGACAAGGGCACCGCC |
| | | GAGGAGCTGAAGGAGAAGTACAAGGAGCTGACCGAGCAGCAGCTGCCCGG |
| | | CGCCCTGCCCCCCGAGTGCACCCCCAACATCGACGGCCCCAACGCCAAGA |
| | | GCGTGCAGCGGGAGCAGAGCCTGCACAGCTTCCACACCCTGTTCTGCCGG |
| | | CGGTGCTTCAAGTACGACTGCTTCCTGCACCCCTTCCACGCCACCCCCAA |
| | | CACCTACAAGCGGAAGAACACCGAGACCGCCCTGGACAACAAGCCCTGCG |
| | | GCCCCCAGTGCTACCAGCACCTGGAGGGCGCCAAGGAGTTCGCCGCCGCC |
| | | CTGACCGCCGAGCGGATCAAGACCCCCCCCAAGCGGCCCGGCGGCCGGCG |
| | | GCGGGGCCGGCTGCCCAACAACAGCAGCCGGCCCAGCACCCCCACCATCA |
| | | ACGTGCTGGAGAGCAAGGACACCGACAGCGACCGGGAGGCCGGCACCGAG |
| | | ACCGGCGGCGAGAACAACGACAAGGAGGAGGAGGAGAAGAAGGACGAGAC |
| | | CAGCAGCAGCAGCGAGGCCAACAGCCGGTGCCAGACCCCCATCAAGATGA |
| | | AGCCCAACATCGAGCCCCCCGAGAACGTGGAGTGGAGCGGCGCCGAGGCC |
| | | AGCATGTTCCGGGTGCTGATCGGCACCTACTACGACAACTTCTGCGCCAT |
| | | CGCCCGGCTGATCGGCACCAAGACCTGCCGGCAGGTGTACGAGTTCCGGG |
| | | TGAAGGAGAGCAGCATCATCGCCCCCGCCCCCGCCGAGGACGTGGACACC |
| | | CCCCCCCGGAAGAAGAAGCGGAAGCACCGGCTGTGGGCCGCCCACTGCCG |
| | | GAAGATCCAGCTGAAGAAGGACGGCAGCAGCAACCACGTGTACAACTACC |
| | | AGCCCTGCGACCACCCCCGGCAGCCCTGCGACAGCAGCTGCCCCTGCGTG |
| | | ATCGCCCAGAACTTCTGCGAGAAGTTCTGCCAGTGCAGCAGCGAGTGCCA |
| | | GAACCGGTTCCCCGGCTGCCGGTGCAAGGCCCAGTGCAACACCAAGCAGT |
| | | GCCCCTGCTACCTGGCCGTGCGGGAGTGCGACCCCGACCTGTGCCTGACC |
| | | TGCGGCGCCGCCGACCACTGGGACAGCAAGAACGTGAGCTGCAAGAACTG |
| | | CAGCATCCAGCGGGGCAGCAAGAAGCACCTGCTGCTGGCCCCCAGCGACG |
| | | TGGCCGGCTGGGGCATCTTCATCAAGGACCCCGTGCAGAAGAACGAGTTC |
| | | ATCAGCGAGTACTGCGGCGAGATCATCAGCCAGGACGAGGCCGACCGGCG |
| | | GGGCAAGGTGTACGACAAGTACATGTGCAGCTTCCTGTTCAACCTGAACA |
| | | ACGACTTCGTGGTGGACGCCACCCGGAAGGGCAACAAGATCCGGTTCGCC |
| | | AACCACAGCGTGAACCCCAACTGCTACGCCAAGGTGATGATGGTGAACGG |
| | | CGACCACCGGATCGGCATCTTCGCCAAGCGGGCCATCCAGACCGGCGAGG |
| | | AGCTGTTCTTCGACTACCGGTACA |
| | | GCCAGGCCGACGCCCTGAAGTACGTGGGCATCGAGCGGGAGATGGAGATC |
| | | CCCGGCAGCAGCGGATCCCTGGAGCCCGGAGAAAAGCCTTACAAATGCCC |
| | | CGAGTGCGGCAAGTCCTTCAGCCAGCTGGCTCATCTGAGAGCTCATCAAA |
| | | GGACCCACACCGGCGAGAAGCCCTATAAGTGCCCCGAGTGCGGAAAATCC |
| | | TTCTCCCAGAGCAGCAATCTCGTCAGACACCAGAGGACCCACACCGGCGA |
| | | GAAACCTTACAAGTGTCCCGAATGTGGAAAGTCCTTCTCCCAAAAGAGCT |
| | | CTCTGATCGCCCATCAGAGAACACATACCGGCGAAAAACCCTACAAGTGC |
| | | CCCGAGTGTGGCAAAAGCTTTTCCACCACCGGCAATCTGACCGTGCATCA |
| | | AAGAACCCACACCGGCGAAAAACCCTACAAATGCCCCGAGTGTGGCAAAT |
| | | CCTTCTCCGACCCCGGCCATCTGGTGAGGCACCAGAGGACACACACCGGC |
| | | GAGAAACCTTATAAATGTCCCGAATGCGGCAAGTCCTTTAGCACCAGCGG |
| | | CTCTCTGGTGAGACATCAGAGGACACATACCGGCGAAAAGCCTTACAAGT |
| | | GTCCCGAGTGTGGCAAAAGCTTCAGCCAGAACAGCACACTGACAGAGCAT |
| | | CAGAGAACCCATACCGGCAAAAAGACCAGCGCTAGCGGCAGCGGCGGCGG |
| | | CAGCGGCGGCAAGCGGCCCGCCGCCACCAAGAAGGCCGGCCAGGCCAAGA |
| | | AGAAGAAGGGCAGCTACCCCTACGACGTGCCCGACTACGCCTGAGCGGCC |
| | | GCTTAATTAAGCTGCCTTCTGCGGGGCTTGCCTTCTGGCCATGCCCTTCT |
| | | TCTCTCCCTTGCACCTGTACCTCTTGGTCTTTGAATAAAGCCTGAGTAGG |
| | | AAGTCTAGAAAAAAAAAAAAAAAAAAAAAAAAAAAAAAAAAAAAAAAAAA |
| | | AAAAAAAAAAAAAAAAAAAAAAAAAAAAAAAAAAAAAA |
| MR- | EZH2- | AGGAAATAAGAGAGAAAAGAAGAGTAAGAAGAAATATAAGAGCCACCATG |
| 29849 | CXCL1 ZF3 | GCCCCCAAGAAGAAGCGGAAGGTGGGCGGCAGCGGCGGCAGCGGCCAGAC |
| (SEQ ID | T7 | CGGCAAGAAGAGCGAGAAGGGCCCCGTGTGCTGGCGGAAGCGGGTGAAGA |
| NO: 234) | | GCGAGTACATGCGGCTGCGGCAGCTGAAGCGGTTCCGGCGGGCCGACGAG |
| | | GTGAAGAGCATGTTCAGCAGCAACCGGCAGAAGATCCTGGAGCGGACCGA |
| | | GATCCTGAACCAGGAGTGGAAGCAGCGGCGAATCCAGCCCGTGCACATCC |
| | | TGACCAGCGTGAGCAGCCTGCGGGGCACCCGGGAGTGCAGCGTGACCAGC |
| | | GACCTGGACTTCCCCACCCAGGTGATCCCCCTAAAGACCCTGAACGCCGT |
| | | GGCCAGCGTGCCCATCATGTACAGCTGGAGCCCCCTGCAGCAGAACTTCA |
| | | TGGTGGAGGACGAGACCGTGCTGCACAACATCCCCTACATGGGCGACGAG |
| | | GTGCTGGACCAGGACGGCACCTTCATCGAGGAGCTGATCAAGAACTACGA |
| | | CGGCAAGGTGCACGGCGACCGGGAGTGCGGCTTCATCAACGACGAGATCT |
| | | TCGTGGAGCTGGTGAACGCCCTGGGCCAGTACAACGACGACGACGACGAC |
| | | GACGACGGCGACGACCCCGAGGAGCGGGAGGAGAAGCAGAAGGACCTGGA |
| | | GGACCACCGGGACGACAAGGAGAGCCGGCCCCCCCGGAAGTTCCCCAGCG |
| | | ACAAGATCTTCGAGGCCATCAGCAGCATGTTCCCCGACAAGGGCACCGCC |
| | | GAGGAGCTGAAGGAGAAGTACAAGGAGCTGACCGAGCAGCAGCTGCCCGG |
| | | CGCCCTGCCCCCCGAGTGCACCCCCAACATCGACGGCCCCAACGCCAAGA |
| | | GCGTGCAGCGGGAGCAGAGCCTGCACAGCTTCCACACCCTGTTCTGCCGG |
| | | CGGTGCTTCAAGTACGACTGCTTCCTGCACCCCTTCCACGCCACCCCCAA |
| | | CACCTACAAGCGGAAGAACACCGAGACCGCCCTGGACAACAAGCCCTGCG |
| | | GCCCCCAGTGCTACCAGCACCTGGAGGGCGCCAAGGAGTTCGCCGCCGCC |
| | | CTGACCGCCGAGCGGATCAAGACCCCCCCCAAGCGGCCCGGCGGCCGGCG |
| | | GCGGGGCCGGCTGCCCAACAACAGCAGCCGGCCCAGCACCCCCACCATCA |
| | | ACGTGCTGGAGAGCAAGGACACCGACAGCGACCGGGAGGCCGGCACCGAG |
| | | ACCGGCGGCGAGAACAACGACAAGGAGGAGGAGGAGAAGAAGGACGAGAC |
| | | CAGCAGCAGCAGCGAGGCCAACAGCCGGTGCCAGACCCCCATCAAGATGA |
| | | AGCCCAACATCGAGCCCCCCGAGAACGTGGAGTGGAGCGGCGCCGAGGCC |
| | | AGCATGTTCCGGGTGCTGATCGGCACCTACTACGACAACTTCTGCGCCAT |
| | | CGCCCGGCTGATCGGCACCAAGACCTGCCGGCAGGTGTACGAGTTCCGGG |
| | | TGAAGGAGAGCAGCATCATCGCCCCCGCCCCCGCCGAGGACGTGGACACC |
| | | CCCCCCCGGAAGAAGAAGCGGAAGCACCGGCTGTGGGCCGCCCACTGCCG |
| | | GAAGATCCAGCTGAAGAAGGACGGCAGCAGCAACCACGTGTACAACTACC |
| | | AGCCCTGCGACCACCCCCGGCAGCCCTGCGACAGCAGCTGCCCCTGCGTG |
| | | ATCGCCCAGAACTTCTGCGAGAAGTTCTGCCAGTGCAGCAGCGAGTGCCA |
| | | GAACCGGTTCCCCGGCTGCCGGTGCAAGGCCCAGTGCAACACCAAGCAGT |
| | | GCCCCTGCTACCTGGCCGTGCGGGAGTGCGACCCCGACCTGTGCCTGACC |
| | | TGCGGCGCCGCCGACCACTGGGACAGCAAGAACGTGAGCTGCAAGAACTG |
| | | CAGCATCCAGCGGGGCAGCAAGAAGCACCTGCTGCTGGCCCCCAGCGACG |
| | | TGGCCGGCTGGGGCATCTTCATCAAGGACCCCGTGCAGAAGAACGAGTTC |
| | | ATCAGCGAGTACTGCGGCGAGATCATCAGCCAGGACGAGGCCGACCGGCG |
| | | GGGCAAGGTGTACGACAAGTACATGTGCAGCTTCCTGTTCAACCTGAACA |
| | | ACGACTTCGTGGTGGACGCCACCCGGAAGGGCAACAAGATCCGGTTCGCC |
| | | AACCACAGCGTGAACCCCAACTGCTACGCCAAGGTGATGATGGTGAACGG |
| | | CGACCACCGGATCGGCATCTTCGCCAAGCGGGCCATCCAGACCGGCGAGG |
| | | AGCTGTTCTTCGACTACCGGTACAGCCAGGCCGACGCCCTGAAGTACGTG |
| | | GGCATCGAGCGGGAGATGGAGATCCCCGGCAGCAGCGGATCCCTGGAGCC |
| | | CGGCGAAAAACCCTATAAATGCCCCGAGTGTGGCAAGAGCTTTTCCGACC |
| | | CCGGACATCTCGTGAGGCATCAGAGAACACATACCGGCGAGAAACCCTAC |
| | | AAGTGCCCCGAATGCGGCAAATCCTTCTCTAGAAAGGACAATCTGAAAAA |
| | | CCATCAAAGAACCCATACCGGCGAGAAGCCCTATAAATGTCCCGAGTGTG |
| | | GAAAGAGCTTCAGCCACAAGAACGCTCTGCAGAACCATCAGAGGACCCAT |
| | | ACCGGCGAAAAGCCTTATAAGTGCCCCGAGTGCGGAAAATCCTTTTCTAG |
| | | AAGGGACGAGCTGAATGTGCACCAAAGGACACATACCGGAGAGAAACCCT |
| | | ACAAATGCCCCGAGTGCGGCAAGTCCTTCAGCACCTCCGGCAATCTGGTG |
| | | AGGCACCAAAGGACACACACCGGCGAAAAACCTTACAAGTGTCCCGAGTG |
| | | CGGAAAAAGCTTTTCCCAGAACAGCACACTGACCGAACACCAAAGGACCC |
| | | ACACCGGAGAGAAACCTTATAAATGTCCCGAGTGTGGAAAGTCCTTTAGC |
| | | CAGTCCGGCAATCTGACAGAGCATCAAAGAACCCACACCGGCAAAAAGAC |
| | | CTCCGCTAGCGGCAGCGGCGGCGGCAGCGGCGGCAAGCGGCCCGCCGCCA |
| | | CCAAGAAGGCCGGCCAGGCCAAGAAGAAGAAGGGCAGCTACCCCTACGAC |
| | | GTGCCCGACTACGCCTGAGCGGCCGCTTAATTAAGCTGCCTTCTGCGGGG |
| | | CTTGCCTTCTGGCCATGCCCTTCTTCTCTCCCTTGCACCTGTACCTCTTG |
| | | GTCTTTGAATAAAGCCTGAGTAGGAAGTCTAGAAAAAAAAAAAAAAAAAA |
| | | AAAAAAAAAAAAAAAAAAAAAAAAAAAAAAAAAAAAAAAAAAAAAAAAAA |
| | | AAAAAAAAAAAA |
| MR- | CXCL1 ZF3- | AGGAAATAAGAGAGAAAAGAAGAGTAAGAAGAAATATAAGAGCCACCATG |
| 29848 | HDAC8 SP6 | GCCCCCAAGAAGAAGCGGAAGGTGGGCATCCACGGCGTGCCCGCCGCCGG |
| (SEQ ID | | CAGCAGCGGATCCCTGGAGCCCGGCGAAAAACCCTATAAATGCCCCGAGT |
| NO: 235) | | GTGGCAAGAGCTTTTCCGACCCCGGACACCTCGTGAGGCATCAGAGAACA |
| | | CATACCGGCGAGAAACCCTACAAGTGCCCCGAATGCGGCAAATCCTTCTC |
| | | TAGAAAGGACAATCTGAAAAACCATCAAAGAACCCATACCGGCGAGAAGC |
| | | CCTATAAATGTCCCGAGTGTGGAAAGAGCTTCAGCCACAAGAACGCTCTG |
| | | CAGAACCATCAGAGGACCCATACCGGCGAAAAGCCTTATAAGTGCCCCGA |
| | | GTGCGGAAAATCCTTTTCTAGAAGGGACGAGCTGAATGTGCACCAAAGGA |
| | | CACATACCGGAGAGAAACCCTACAAATGCCCCGAGTGCGGCAAGTCCTTC |
| | | AGCACCTCCGGCAATCTGGTGAGGCACCAAAGGACACACACCGGCGAAAA |
| | | ACCTTACAAGTGTCCCGAGTGCGGAAAAAGCTTTTCCCAGAACAGCACAC |
| | | TGACCGAACACCAAAGGACCCACACCGGAGAGAAACCTTATAAATGTCCC |
| | | GAGTGTGGAAAGTCCTTTAGCCAGTCCGGCAATCTGACAGAGCATCAAAG |
| | | AACCCACACCGGCAAAAAGACCTCCGCTAGCGGCAGCGGCGGCGGCAGCG |
| | | GCGGCGAGGAGCCCGAGGAGCCCGCCGATAGCGGACAATCTCTGGTGCCC |
| | | GTCTACATCTACAGCCCCGAATATGTGAGCATGTGTGATTCCCTCGCCAA |
| | | GATCCCTAAGAGAGCCAGCATGGTGCATTCTCTGATCGAGGCCTACGCTC |
| | | TGCATAAGCAAATGAGGATCGTGAAGCCCAAGGTCGCCAGCATGGAAGAG |
| | | ATGGCCACCTTTCACACCGATGCCTACCTCCAACATCTCCAGAAGGTGTC |
| | | CCAAGAGGGCGACGACGACCACCCCGACTCCATTGAGTACGGACTGGGCT |
| | | ATGATTGCCCCGCCACCGAGGGCATCTTTGACTATGCCGCCGCTATCGGC |
| | | GGAGCTACCATCACAGCCGCCCAGTGTCTGATTGATGGCATGTGCAAGGT |
| | | CGCCATCAACTGGTCCGGAGGCTGGCATCATGCCAAGAAGGATGAGGCCT |
| | | CCGGCTTCTGTTATCTGAATGACGCCGTGCTGGGCATTCTGAGACTGAGG |
| | | AGGAAATTCGAGAGGATTCTGTACGTGGATCTGGATCTGCATCACGGAGA |
| | | TGGAGTCGAAGATGCCTTCAGCTTCACCAGCAAGGTGATGACAGTCTCTC |
| | | TGCACAAGTTCTCCCCCGGCTTCTTTCCCGGAACCGGCGACGTGTCCGAC |
| | | GTGGGACTGGGCAAGGGAAGGTACTACAGCGTGAACGTGCCCATTCAAGA |
| | | CGGCATCCAAGACGAGAAGTACTACCAGATCTGCGAGTCCGTGCTCAAGG |
| | | AGGTCTACCAAGCCTTCAATCCTAAGGCTGTCGTGCTCCAACTGGGAGCT |
| | | GATACCATTGCTGGCGATCCCATGTGCAGCTTCAATATGACACCCGTCGG |
| | | AATCGGCAAGTGCCTCAAGTACATCCTCCAGTGGCAGCTCGCCACCCTCA |
| | | TTCTCGGAGGAGGCGGATACAATCTGGCTAATACCGCCAGATGCTGGACC |
| | | TATCTGACCGGCGTGATTCTGGGCAAAACACTGAGCAGCGAAATCCCCGA |
| | | CCACGAGTTTTTCACCGCTTACGGCCCCGACTACGTGCTGGAGATCACCC |
| | | CCAGCTGCAGACCCGATAGAAACGAACCCCATAGAATCCAGCAAATTCTG |
| | | AACTATATCAAGGGCAACCTCAAGCACGTCGTGGGAGGTGGCGGATCGGG |
| | | AAAGCGGCCCGCCGCCACCAAGAAGGCCGGTCAGGCCAAGAAGAAGAAGG |
| | | GCAGCTACCCCTACGACGTGCCCGACTACGCCTGAGCGGCCGCTTAATTA |
| | | AGCTGCCTTCTGCGGGGCTTGCCTTCTGGCCATGCCCTTCTTCTCTCCCT |
| | | TGCACCTGTACCTCTTGGTCTTTGAATAAAGCCTGAGTAGGAAGTCTAGA |
| | | AAAAAAAAAAAAAAAAAAAAAAAAAAAAAAAAAAAAAAAAAAAAAAAAAA |
| | | AAAAAAAAAAAAAAAAAAAAAAAAAAAAA |
| MR- | CXCL1 ZF6- | AGGAAATAAGAGAGAAAAGAAGAGTAAGAAGAAATATAAGAGCCACCATG |
| 29847 | DNMT3a-3L | GCCCCCAAGAAGAAGCGGAAGGTGGGCATCCACGGCGTGCCCGCCGCCGG |
| (SEQ ID | SP6 | CAGCAGCGGATCCCTGGAGCCCGGCGAAAAGCCTTACAAGTGTCCCGAGT |
| NO: 236) | | GCGGAAAGAGCTTCAGCAGAGCCGATAATCTGACCGAGCACCAAAGGACC |
| | | CACACCGGAGAGAAGCCTTATAAGTGTCCCGAATGCGGCAAAAGCTTTTC |
| | | TAGAAGCGATCATCTGACCAACCACCAGAGGACACACACCGGAGAAAAAC |
| | | CTTACAAATGCCCCGAGTGCGGCAAAAGCTTCTCCCAGAGCAGCAATCTG |
| | | GTGAGACACCAAAGGACCCACACCGGCGAAAAACCCTATAAATGCCCCGA |
| | | ATGTGGCAAGAGCTTTAGCACATCCGGCGAGCTGGTGAGGCATCAAAGAA |
| | | CACATACCGGCGAGAAGCCCTACAAGTGCCCCGAGTGTGGAAAAAGCTTC |
| | | AGCACCCACCTCGATCTGATCAGACACCAGAGGACCCATACCGGAGAGAA |
| | | ACCCTACAAATGTCCCGAGTGCGGAAAGTCCTTTAGCCAGCTGGCCCATC |
| | | TGAGAGCTCATCAAAGGACACACACCGGCGAGAAGCCTTACAAGTGTCCC |
| | | GAGTGCGGAAAATCCTTCTCCCAACTGGCCCATCTGAGGGCCCACCAGAG |
| | | AACCCACACCGGCAAAAAGACCTCCGCTAGCGGCAGCGGCGGCGGCAGCG |
| | | GCGGCAACCACGACCAGGAGTTCGACCCCCCCAAGGTGTACCCCCCCGTG |
| | | CCCGCCGAGAAGCGGAAGCCCATCCGGGTGCTGAGCCTGTTCGACGGCAT |
| | | CGCCACCGGCCTGCTGGTGCTGAAGGACCTGGGCATCCAGGTGGACCGGT |
| | | ACATCGCCAGCGAGGTGTGCGAGGACAGCATCACCGTGGGCATGGTGCGG |
| | | CACCAGGGCAAGATCATGTACGTGGGCGACGTGCGGAGCGTGACCCAGAA |
| | | GCACATCCAGGAGTGGGGCCCCTTCGACCTGGTGATCGGCGGCAGCCCCT |
| | | GCAACGACCTGAGCATCGTGAACCCCGCCCGGAAGGGCCTGTACGAGGGC |
| | | ACCGGCCGGCTGTTCTTCGAGTTCTACCGGCTGCTGCACGACGCCCGGCC |
| | | CAAGGAGGGCGACGACCGGCCCTTCTTCTGGCTGTTCGAGAACGTGGTGG |
| | | CCATGGGCGTGAGCGACAAGCGGGACATCAGCCGGTTCCTGGAGAGCAAC |
| | | CCCGTGATGATCGACGCCAAGGAGGTGAGCGCCGCCCACCGGGCCCGGTA |
| | | CTTCTGGGGCAACCTGCCCGGCATGAACCGGCCCCTGGCCAGCACCGTGA |
| | | ACGACAAGCTGGAGCTGCAGGAGTGCCTGGAGCACGGCCGGATCGCCAAG |
| | | TTCAGCAAGGTGCGGACCATCACCACCCGGAGCAACAGCATCAAGCAGGG |
| | | CAAGGACCAGCACTTCCCCGTGTTCATGAACGAGAAGGAGGACATCCTGT |
| | | GGTGCACCGAGATGGAGCGGGTGTTCGGCTTCCCCGTGCACTACACCGAC |
| | | GTGAGCAACATGAGCCGGCTGGCCCGGCAGCGGCTGCTGGGCCGGAGCTG |
| | | GAGCGTGCCCGTGATCCGGCACCTGTTCGCCCCCCTGAAGGAGTACTTCG |
| | | CCTGCGTGAGCAGCGGCAACAGCAACGCCAACAGCCGGGGCCCCAGCTTC |
| | | AGCAGCGGCCTGGTGCCCCTGAGCCTGCGGGGCAGCCACATGAATCCTCT |
| | | GGAGATGTTCGAGACAGTGCCCGTGTGGAGAAGGCAACCCGTGAGGGTGC |
| | | TGAGCCTCTTCGAGGACATTAAGAAGGAGCTGACCTCTCTGGGCTTTCTG |
| | | GAATCCGGCAGCGACCCCGGCCAGCTGAAACACGTGGTGGACGTGACCGA |
| | | CACAGTGAGGAAGGACGTGGAAGAGTGGGGCCCCTTTGACCTCGTGTATG |
| | | GAGCCACACCTCCTCTCGGCCACACATGCGATAGGCCTCCCAGCTGGTAT |
| | | CTCTTCCAGTTCCACAGACTGCTCCAGTACGCCAGACCTAAGCCCGGCAG |
| | | CCCCAGACCCTTCTTCTGGATGTTCGTGGACAATCTGGTGCTGAACAAGG |
| | | AGGATCTGGATGTGGCCAGCAGATTTCTGGAGATGGAACCCGTGACAATC |
| | | CCCGACGTGCATGGCGGCTCTCTGCAGAACGCCGTGAGAGTGTGGTCCAA |
| | | CATCCCCGCCATTAGAAGCAGACACTGGGCTCTGGTGAGCGAGGAGGAAC |
| | | TGTCTCTGCTGGCCCAGAATAAGCAGTCCTCCAAGCTGGCCGCCAAGTGG |
| | | CCCACCAAGCTGGTGAAGAACTGCTTTCTGCCTCTGAGGGAGTATTTCAA |
| | | GTATTTCAGCACCGAACTGACCAGCAGCCTGAGCGGCGGCAAGCGGCCCG |
| | | CCGCCACCAAGAAGGCCGGCCAGGCCAAGAAGAAGAAGGGCAGCTACCCC |
| | | TACGACGTGCCCGACTACGCCTGAGCGGCCGCTTAATTAAGCTGCCTTCT |
| | | GCGGGGCTTGCCTTCTGGCCATGCCCTTCTTCTCTCCCTTGCACCTGTAC |
| | | CTCTTGGTCTTTGAATAAAGCCTGAGTAGGAAGTCTAGAAAAAAAAAAAA |
| | | AAAAAAAAAAAAAAAAAAAAAAAAAAAAAAAAAAAAAAAAAAAAAAAAAA |
| | | AAAAAAAAAAAAAAAAAA |
| MR- | CXCL1 ZF4- | AGGAAATAAGAGAGAAAAGAAGAGTAAGAAGAAATATAAGAGCCACCATG |
| 29846 | DNMT3a-3L | GCCCCCAAGAAGAAGCGGAAGGTGGGCATCCACGGCGTGCCCGCCGCCGG |
| (SEQ ID | SP6 | CAGCAGCGGATCCCTGGAGCCCGGAGAAAAGCCTTACAAATGCCCCGAGT |
| NO: 237) | | GCGGCAAGTCCTTCAGCCAGCTGGCTCATCTGAGAGCTCATCAAAGGACC |
| | | CACACCGGCGAGAAGCCCTATAAGTGCCCCGAGTGCGGAAAATCCTTCTC |
| | | CCAGAGCAGCAATCTCGTCAGACACCAGAGGACCCACACCGGCGAGAAAC |
| | | CTTACAAGTGTCCCGAATGTGGAAAGTCCTTCTCCCAAAAGAGCTCTCTG |
| | | ATCGCCCATCAGAGAACACATACCGGCGAAAAACCCTACAAGTGCCCCGA |
| | | GTGTGGCAAAAGCTTTTCCACCACCGGCAATCTGACCGTGCATCAAAGAA |
| | | CCCACACCGGCGAAAAACCCTACAAATGCCCCGAGTGTGGCAAATCCTTC |
| | | TCCGACCCCGGCCATCTGGTGAGGCACCAGAGGACACACACCGGCGAGAA |
| | | ACCTTATAAATGTCCCGAATGCGGCAAGTCCTTTAGCACCAGCGGCTCTC |
| | | TGGTGAGACATCAGAGGACACATACCGGCGAAAAGCCTTACAAGTGTCCC |
| | | GAGTGTGGCAAAAGCTTCAGCCAGAACAGCACACTGACAGAGCATCAGAG |
| | | AACCCATACCGGCAAAAAGACCAGCGCTAGCGGCAGCGGCGGCGGCAGCG |
| | | GCGGCAACCACGACCAGGAGTTCGACCCCCCCAAGGTGTACCCCCCCGTG |
| | | CCCGCCGAGAAGCGGAAGCCCATCCGGGTGCTGAGCCTGTTCGACGGCAT |
| | | CGCCACCGGCCTGCTGGTGCTGAAGGACCTGGGCATCCAGGTGGACCGGT |
| | | ACATCGCCAGCGAGGTGTGCGAGGACAGCATCACCGTGGGCATGGTGCGG |
| | | CACCAGGGCAAGATCATGTACGTGGGCGACGTGCGGAGCGTGACCCAGAA |
| | | GCACATCCAGGAGTGGGGCCCCTTCGACCTGGTGATCGGCGGCAGCCCCT |
| | | GCAACGACCTGAGCATCGTGAACCCCGCCCGGAAGGGCCTGTACGAGGGC |
| | | ACCGGCCGGCTGTTCTTCGAGTTCTACCGGCTGCTGCACGACGCCCGGCC |
| | | CAAGGAGGGCGACGACCGGCCCTTCTTCTGGCTGTTCGAGAACGTGGTGG |
| | | CCATGGGCGTGAGCGACAAGCGGGACATCAGCCGGTTCCTGGAGAGCAAC |
| | | CCCGTGATGATCGACGCCAAGGAGGTGAGCGCCGCCCACCGGGCCCGGTA |
| | | CTTCTGGGGCAACCTGCCCGGCATGAACCGGCCCCTGGCCAGCACCGTGA |
| | | ACGACAAGCTGGAGCTGCAGGAGTGCCTGGAGCACGGCCGGATCGCCAAG |
| | | TTCAGCAAGGTGCGGACCATCACCACCCGGAGCAACAGCATCAAGCAGGG |
| | | CAAGGACCAGCACTTCCCCGTGTTCATGAACGAGAAGGAGGACATCCTGT |
| | | GGTGCACCGAGATGGAGCGGGTGTTCGGCTTCCCCGTGCACTACACCGAC |
| | | GTGAGCAACATGAGCCGGCTGGCCCGGCAGCGGCTGCTGGGCCGGAGCTG |
| | | GAGCGTGCCCGTGATCCGGCACCTGTTCGCCCCCCTGAAGGAGTACTTCG |
| | | CCTGCGTGAGCAGCGGCAACAGCAACGCCAACAGCCGGGGCCCCAGCTTC |
| | | AGCAGCGGCCTGGTGCCCCTGAGCCTGCGGGGCAGCCACATGAATCCTCT |
| | | GGAGATGTTCGAGACAGTGCCCGTGTGGAGAAGGCAACCCGTGAGGGTGC |
| | | TGAGCCTCTTCGAGGACATTAAGAAGGAGCTGACCTCTCTGGGCTTTCTG |
| | | GAATCCGGCAGCGACCCCGGCCAGCTGAAACACGTGGTGGACGTGACCGA |
| | | CACAGTGAGGAAGGACGTGGAAGAGTGGGGCCCCTTTGACCTCGTGTATG |
| | | GAGCCACACCTCCTCTCGGCCACACATGCGATAGGCCTCCCAGCTGGTAT |
| | | CTCTTCCAGTTCCACAGACTGCTCCAGTACGCCAGACCTAAGCCCGGCAG |
| | | CCCCAGACCCTTCTTCTGGATGTTCGTGGACAATCTGGTGCTGAACAAGG |
| | | AGGATCTGGATGTGGCCAGCAGATTTCTGGAGATGGAACCCGTGACAATC |
| | | CCCGACGTGCATGGCGGCTCTCTGCAGAACGCCGTGAGAGTGTGGTCCAA |
| | | CATCCCCGCCATTAGAAGCAGACACTGGGCTCTGGTGAGCGAGGAGGAAC |
| | | TGTCTCTGCTGGCCCAGAATAAGCAGTCCTCCAAGCTGGCCGCCAAGTGG |
| | | CCCACCAAGCTGGTGAAGAACTGCTTTCTGCCTCTGAGGGAGTATTTCAA |
| | | GTATTTCAGCACCGAACTGACCAGCAGCCTGAGCGGCGGCAAGCGGCCCG |
| | | CCGCCACCAAGAAGGCCGGCCAGGCCAAGAAGAAGAAGGGCAGCTACCCC |
| | | TACGACGTGCCCGACTACGCCTGAGCGGCCGCTTAATTAAGCTGCCTTCT |
| | | GCGGGGCTTGCCTTCTGGCCATGCCCTTCTTCTCTCCCTTGCACCTGTAC |
| | | CTCTTGGTCTTTGAATAAAGCCTGAGTAGGAAGTCTAGAAAAAAAAAAAA |
| | | AAAAAAAAAAAAAAAAAAAAAAAAAAAAAAAAAAAAAAAAAAAAAAAAAA |
| | | AAAAAAAAAAAAAAAAAA |
| MR- | CXCL1 ZF3- | AGGAAATAAGAGAGAAAAGAAGAGTAAGAAGAAATATAAGAGCCACCATG |
| 29845 | DNMT3a-3L | GCCCCCAAGAAGAAGCGGAAGGTGGGCATCCACGGCGTGCCCGCCGCCGG |
| (SEQ ID | SP6 | CAGCAGCGGATCCCTGGAGCCCGGCGAAAAACCCTATAAATGCCCCGAGT |
| NO: 238) | | GTGGCAAGAGCTTTTCCGACCCCGGACACCTCGTGAGGCATCAGAGAACA |
| | | CATACCGGCGAGAAACCCTACAAGTGCCCCGAATGCGGCAAATCCTTCTC |
| | | TAGAAAGGACAATCTGAAAAACCATCAAAGAACCCATACCGGCGAGAAGC |
| | | CCTATAAATGTCCCGAGTGTGGAAAGAGCTTCAGCCACAAGAACGCTCTG |
| | | CAGAACCATCAGAGGACCCATACCGGCGAAAAGCCTTATAAGTGCCCCGA |
| | | GTGCGGAAAATCCTTTTCTAGAAGGGACGAGCTGAATGTGCACCAAAGGA |
| | | CACATACCGGAGAGAAACCCTACAAATGCCCCGAGTGCGGCAAGTCCTTC |
| | | AGCACCTCCGGCAATCTGGTGAGGCACCAAAGGACACACACCGGCGAAAA |
| | | ACCTTACAAGTGTCCCGAGTGCGGAAAAAGCTTTTCCCAGAACAGCACAC |
| | | TGACCGAACACCAAAGGACCCACACCGGAGAGAAACCTTATAAATGTCCC |
| | | GAGTGTGGAAAGTCCTTTAGCCAGTCCGGCAATCTGACAGAGCATCAAAG |
| | | AACCCACACCGGCAAAAAGACCTCCGCTAGCGGCAGCGGCGGCGGCAGCG |
| | | GCGGCAACCACGACCAGGAGTTCGACCCCCCCAAGGTGTACCCCCCCGTG |
| | | CCCGCCGAGAAGCGGAAGCCCATCCGGGTGCTGAGCCTGTTCGACGGCAT |
| | | CGCCACCGGCCTGCTGGTGCTGAAGGACCTGGGCATCCAGGTGGACCGGT |
| | | ACATCGCCAGCGAGGTGTGCGAGGACAGCATCACCGTGGGCATGGTGCGG |
| | | CACCAGGGCAAGATCATGTACGTGGGCGACGTGCGGAGCGTGACCCAGAA |
| | | GCACATCCAGGAGTGGGGCCCCTTCGACCTGGTGATCGGCGGCAGCCCCT |
| | | GCAACGACCTGAGCATCGTGAACCCCGCCCGGAAGGGCCTGTACGAGGGC |
| | | ACCGGCCGGCTGTTCTTCGAGTTCTACCGGCTGCTGCACGACGCCCGGCC |
| | | CAAGGAGGGCGACGACCGGCCCTTCTTCTGGCTGTTCGAGAACGTGGTGG |
| | | CCATGGGCGTGAGCGACAAGCGGGACATCAGCCGGTTCCTGGAGAGCAAC |
| | | CCCGTGATGATCGACGCCAAGGAGGTGAGCGCCGCCCACCGGGCCCGGTA |
| | | CTTCTGGGGCAACCTGCCCGGCATGAACCGGCCCCTGGCCAGCACCGTGA |
| | | ACGACAAGCTGGAGCTGCAGGAGTGCCTGGAGCACGGCCGGATCGCCAAG |
| | | TTCAGCAAGGTGCGGACCATCACCACCCGGAGCAACAGCATCAAGCAGGG |
| | | CAAGGACCAGCACTTCCCCGTGTTCATGAACGAGAAGGAGGACATCCTGT |
| | | GGTGCACCGAGATGGAGCGGGTGTTCGGCTTCCCCGTGCACTACACCGAC |
| | | GTGAGCAACATGAGCCGGCTGGCCCGGCAGCGGCTGCTGGGCCGGAGCTG |
| | | GAGCGTGCCCGTGATCCGGCACCTGTTCGCCCCCCTGAAGGAGTACTTCG |
| | | CCTGCGTGAGCAGCGGCAACAGCAACGCCAACAGCCGGGGCCCCAGCTTC |
| | | AGCAGCGGCCTGGTGCCCCTGAGCCTGCGGGGCAGCCACATGAATCCTCT |
| | | GGAGATGTTCGAGACAGTGCCCGTGTGGAGAAGGCAACCCGTGAGGGTGC |
| | | TGAGCCTCTTCGAGGACATTAAGAAGGAGCTGACCTCTCTGGGCTTTCTG |
| | | GAATCCGGCAGCGACCCCGGCCAGCTGAAACACGTGGTGGACGTGACCGA |
| | | CACAGTGAGGAAGGACGTGGAAGAGTGGGGCCCCTTTGACCTCGTGTATG |
| | | GAGCCACACCTCCTCTCGGCCACACATGCGATAGGCCTCCCAGCTGGTAT |
| | | CTCTTCCAGTTCCACAGACTGCTCCAGTACGCCAGACCTAAGCCCGGCAG |
| | | CCCCAGACCCTTCTTCTGGATGTTCGTGGACAATCTGGTGCTGAACAAGG |
| | | AGGATCTGGATGTGGCCAGCAGATTTCTGGAGATGGAACCCGTGACAATC |
| | | CCCGACGTGCATGGCGGCTCTCTGCAGAACGCCGTGAGAGTGTGGTCCAA |
| | | CATCCCCGCCATTAGAAGCAGACACTGGGCTCTGGTGAGCGAGGAGGAAC |
| | | TGTCTCTGCTGGCCCAGAATAAGCAGTCCTCCAAGCTGGCCGCCAAGTGG |
| | | CCCACCAAGCTGGTGAAGAACTGCTTTCTGCCTCTGAGGGAGTATTTCAA |
| | | GTATTTCAGCACCGAACTGACCAGCAGCCTGAGCGGCGGCAAGCGGCCCG |
| | | CCGCCACCAAGAAGGCCGGCCAGGCCAAGAAGAAGAAGGGCAGCTACCCC |
| | | TACGACGTGCCCGACTACGCCTGAGCGGCCGCTTAATTAAGCTGCCTTCT |
| | | GCGGGGCTTGCCTTCTGGCCATGCCCTTCTTCTCTCCCTTGCACCTGTAC |
| | | CTCTTGGTCTTTGAATAAAGCCTGAGTAGGAAGTCTAGAAAAAAAAAAAA |
| | | AAAAAAAAAAAAAAAAAAAAAAAAAAAAAAAAAAAAAAAAAAAAAAAAAA |
| | | AAAAAAAAAAAAAAAAAA |
| MR- | CXCL1 ZF1- | AGGAAATAAGAGAGAAAAGAAGAGTAAGAAGAAATATAAGAGCCACCATG |
| 29787 | DNMT3a-3L | GCCCCCAAGAAGAAGCGGAAGGTGGGCATCCACGGCGTGCCCGCCGCCGG |
| (SEQ ID | SP6 | CAGCAGCGGATCCCTGGAGCCCGGCGAAAAGCCTTACAAATGTCCCGAAT |
| NO: 239) | | GCGGAAAGAGCTTCAGCAGAGCCGACAATCTGACCGAACATCAGAGAACC |
| | | CATACCGGAGAAAAACCTTACAAATGTCCCGAGTGCGGCAAAAGCTTCTC |
| | | CCAAGCCGGACATCTGGCCAGCCACCAAAGGACACATACCGGCGAGAAAC |
| | | CCTACAAGTGCCCCGAGTGCGGCAAGTCCTTCTCTAGATCCGATGAGCTG |
| | | GTCAGACATCAGAGAACCCATACCGGCGAGAAGCCTTATAAGTGCCCCGA |
| | | ATGTGGCAAGTCCTTCAGCCAGAGAGCTCATCTGGAGAGGCATCAAAGAA |
| | | CACACACCGGAGAGAAACCTTACAAGTGTCCCGAGTGTGGAAAGAGCTTC |
| | | TCCAGAAGGGACGAGCTGAACGTCCACCAAAGAACCCATACCGGCGAAAA |
| | | GCCCTATAAATGCCCCGAGTGTGGAAAATCCTTTTCTAGATCCGACCATC |
| | | TGACAACCCACCAGAGGACCCATACCGGAGAGAAGCCCTACAAATGCCCC |
| | | GAGTGTGGAAAAAGCTTCTCTAGAAACGATGCTCTGACAGAGCACCAAAG |
| | | GACCCACACCGGCAAAAAGACCAGCGCTAGCGGCAGCGGCGGCGGCAGCG |
| | | GCGGCAACCACGACCAGGAGTTCGACCCCCCCAAGGTGTACCCCCCCGTG |
| | | CCCGCCGAGAAGCGGAAGCCCATCCGGGTGCTGAGCCTGTTCGACGGCAT |
| | | CGCCACCGGCCTGCTGGTGCTGAAGGACCTGGGCATCCAGGTGGACCGGT |
| | | ACATCGCCAGCGAGGTGTGCGAGGACAGCATCACCGTGGGCATGGTGCGG |
| | | CACCAGGGCAAGATCATGTACGTGGGCGACGTGCGGAGCGTGACCCAGAA |
| | | GCACATCCAGGAGTGGGGCCCCTTCGACCTGGTGATCGGCGGCAGCCCCT |
| | | GCAACGACCTGAGCATCGTGAACCCCGCCCGGAAGGGCCTGTACGAGGGC |
| | | ACCGGCCGGCTGTTCTTCGAGTTCTACCGGCTGCTGCACGACGCCCGGCC |
| | | CAAGGAGGGCGACGACCGGCCCTTCTTCTGGCTGTTCGAGAACGTGGTGG |
| | | CCATGGGCGTGAGCGACAAGCGGGACATCAGCCGGTTCCTGGAGAGCAAC |
| | | CCCGTGATGATCGACGCCAAGGAGGTGAGCGCCGCCCACCGGGCCCGGTA |
| | | CTTCTGGGGCAACCTGCCCGGCATGAACCGGCCCCTGGCCAGCACCGTGA |
| | | ACGACAAGCTGGAGCTGCAGGAGTGCCTGGAGCACGGCCGGATCGCCAAG |
| | | TTCAGCAAGGTGCGGACCATCACCACCCGGAGCAACAGCATCAAGCAGGG |
| | | CAAGGACCAGCACTTCCCCGTGTTCATGAACGAGAAGGAGGACATCCTGT |
| | | GGTGCACCGAGATGGAGCGGGTGTTCGGCTTCCCCGTGCACTACACCGAC |
| | | GTGAGCAACATGAGCCGGCTGGCCCGGCAGCGGCTGCTGGGCCGGAGCTG |
| | | GAGCGTGCCCGTGATCCGGCACCTGTTCGCCCCCCTGAAGGAGTACTTCG |
| | | CCTGCGTGAGCAGCGGCAACAGCAACGCCAACAGCCGGGGCCCCAGCTTC |
| | | AGCAGCGGCCTGGTGCCCCTGAGCCTGCGGGGCAGCCACATGAATCCTCT |
| | | GGAGATGTTCGAGACAGTGCCCGTGTGGAGAAGGCAACCCGTGAGGGTGC |
| | | TGAGCCTCTTCGAGGACATTAAGAAGGAGCTGACCTCTCTGGGCTTTCTG |
| | | GAATCCGGCAGCGACCCCGGCCAGCTGAAACACGTGGTGGACGTGACCGA |
| | | CACAGTGAGGAAGGACGTGGAAGAGTGGGGCCCCTTTGACCTCGTGTATG |
| | | GAGCCACACCTCCTCTCGGCCACACATGCGATAGGCCTCCCAGCTGGTAT |
| | | CTCTTCCAGTTCCACAGACTGCTCCAGTACGCCAGACCTAAGCCCGGCAG |
| | | CCCCAGACCCTTCTTCTGGATGTTCGTGGACAATCTGGTGCTGAACAAGG |
| | | AGGATCTGGATGTGGCCAGCAGATTTCTGGAGATGGAACCCGTGACAATC |
| | | CCCGACGTGCATGGCGGCTCTCTGCAGAACGCCGTGAGAGTGTGGTCCAA |
| | | CATCCCCGCCATTAGAAGCAGACACTGGGCTCTGGTGAGCGAGGAGGAAC |
| | | TGTCTCTGCTGGCCCAGAATAAGCAGTCCTCCAAGCTGGCCGCCAAGTGG |
| | | CCCACCAAGCTGGTGAAGAACTGCTTTCTGCCTCTGAGGGAGTATTTCAA |
| | | GTATTTCAGCACCGAACTGACCAGCAGCCTGAGCGGCGGCAAGCGGCCCG |
| | | CCGCCACCAAGAAGGCCGGCCAGGCCAAGAAGAAGAAGGGCAGCTACCCC |
| | | TACGACGTGCCCGACTACGCCTGAGCGGCCGCTTAATTAAGCTGCCTTCT |
| | | GCGGGGCTTGCCTTCTGGCCATGCCCTTCTTCTCTCCCTTGCACCTGTAC |
| | | CTCTTGGTCTTTGAATAAAGCCTGAGTAGGAAGTCTAGAAAAAAAAAAAA |
| | | AAAAAAAAAAAAAAAAAAAAAAAAAAAAAAAAAAAAAAAAAAAAAAAAAA |
| | | AAAAAAAAAAAAAAAAAA |
| MR- | CXCL1 ZF5- | AGGAAATAAGAGAGAAAAGAAGAGTAAGAAGAAATATAAGAGCCACCATG |
| 29783 | HDAC8 SP6 | GCCCCCAAGAAGAAGCGGAAGGTGGGCATCCACGGCGTGCCCGCCGCCGG |
| (SEQ ID | | CAGCAGCGGATCCCTGGAGCCCGGCGAAAAGCCTTACAAGTGCCCCGAGT |
| NO: 240) | | GTGGCAAATCCTTTAGCACCACCGGAAATCTGACCGTCCACCAGAGAACA |
| | | CATACCGGCGAGAAACCCTACAAGTGTCCCGAGTGCGGCAAATCCTTCAG |
| | | CCAGCTGGCCCATCTGAGAGCCCATCAAAGGACCCATACCGGCGAGAAAC |
| | | CTTACAAGTGTCCCGAATGTGGAAAGTCCTTTAGCAGCCCCGCCGATCTG |
| | | ACAAGACATCAAAGAACCCACACCGGCGAGAAGCCCTATAAATGTCCCGA |
| | | GTGTGGAAAGTCCTTCAGCCAGAGCGGCAATCTGACCGAGCATCAAAGAA |
| | | CCCATACCGGCGAAAAGCCCTATAAGTGCCCCGAATGCGGAAAAAGCTTC |
| | | TCCACAAGCGGCGAGCTGGTGAGACACCAAAGGACACATACCGGCGAAAA |
| | | GCCTTATAAATGCCCCGAGTGCGGCAAGAGCTTCTCTAGAAAGGACAATC |
| | | TGAAGAACCACCAAAGAACACACACCGGCGAGAAGCCCTACAAATGCCCC |
| | | GAGTGCGGCAAGAGCTTTAGCCAGTCCAGCAACCTCGTGAGACATCAGAG |
| | | GACACATACCGGAAAAAAGACCAGCGCTAGCGGCAGCGGCGGCGGCAGCG |
| | | GCGGCGAGGAGCCCGAGGAGCCCGCCGATAGCGGACAATCTCTGGTGCCC |
| | | GTCTACATCTACAGCCCCGAATATGTGAGCATGTGTGATTCCCTCGCCAA |
| | | GATCCCTAAGAGAGCCAGCATGGTGCATTCTCTGATCGAGGCCTACGCTC |
| | | TGCATAAGCAAATGAGGATCGTGAAGCCCAAGGTCGCCAGCATGGAAGAG |
| | | ATGGCCACCTTTCACACCGATGCCTACCTCCAACATCTCCAGAAGGTGTC |
| | | CCAAGAGGGCGACGACGACCACCCCGACTCCATTGAGTACGGACTGGGCT |
| | | ATGATTGCCCCGCCACCGAGGGCATCTTTGACTATGCCGCCGCTATCGGC |
| | | GGAGCTACCATCACAGCCGCCCAGTGTCTGATTGATGGCATGTGCAAGGT |
| | | CGCCATCAACTGGTCCGGAGGCTGGCATCATGCCAAGAAGGATGAGGCCT |
| | | CCGGCTTCTGTTATCTGAATGACGCCGTGCTGGGCATTCTGAGACTGAGG |
| | | AGGAAATTCGAGAGGATTCTGTACGTGGATCTGGATCTGCATCACGGAGA |
| | | TGGAGTCGAAGATGCCTTCAGCTTCACCAGCAAGGTGATGACAGTCTCTC |
| | | TGCACAAGTTCTCCCCCGGCTTCTTTCCCGGAACCGGCGACGTGTCCGAC |
| | | GTGGGACTGGGCAAGGGAAGGTACTACAGCGTGAACGTGCCCATTCAAGA |
| | | CGGCATCCAAGACGAGAAGTACTACCAGATCTGCGAGTCCGTGCTCAAGG |
| | | AGGTCTACCAAGCCTTCAATCCTAAGGCTGTCGTGCTCCAACTGGGAGCT |
| | | GATACCATTGCTGGCGATCCCATGTGCAGCTTCAATATGACACCCGTCGG |
| | | AATCGGCAAGTGCCTCAAGTACATCCTCCAGTGGCAGCTCGCCACCCTCA |
| | | TTCTCGGAGGAGGCGGATACAATCTGGCTAATACCGCCAGATGCTGGACC |
| | | TATCTGACCGGCGTGATTCTGGGCAAAACACTGAGCAGCGAAATCCCCGA |
| | | CCACGAGTTTTTCACCGCTTACGGCCCCGACTACGTGCTGGAGATCACCC |
| | | CCAGCTGCAGACCCGATAGAAACGAACCCCATAGAATCCAGCAAATTCTG |
| | | AACTATATCAAGGGCAACCTCAAGCACGTCGTGGGAGGTGGCGGATCGGG |
| | | AAAGCGGCCCGCCGCCACCAAGAAGGCCGGTCAGGCCAAGAAGAAGAAGG |
| | | GCAGCTACCCCTACGACGTGCCCGACTACGCCTGAGCGGCCGCTTAATTA |
| | | AGCTGCCTTCTGCGGGGCTTGCCTTCTGGCCATGCCCTTCTTCTCTCCCT |
| | | TGCACCTGTACCTCTTGGTCTTTGAATAAAGCCTGAGTAGGAAGTCTAGA |
| | | AAAAAAAAAAAAAAAAAAAAAAAAAAAAAAAAAAAAAAAAAAAAAAAAAA |
| | | AAAAAAAAAAAAAAAAAAAAAAAAAAAAA |
| MR- | CXCL1 ZF2- | AGGAAATAAGAGAGAAAAGAAGAGTAAGAAGAAATATAAGAGCCACCATG |
| 29782 | HDAC8 SP6 | GCCCCCAAGAAGAAGCGGAAGGTGGGCATCCACGGCGTGCCCGCCGCCGG |
| (SEQ ID | | CAGCAGCGGATCCCTGGAGCCCGGCGAAAAACCCTATAAGTGCCCCGAGT |
| NO: 241) | | GCGGCAAGAGCTTTAGCGATCCCGGCCATCTGGTGAGGCATCAGAGGACC |
| | | CACACCGGCGAAAAGCCTTACAAATGCCCCGAGTGTGGAAAAAGCTTCAG |
| | | CAGAAGCGATCATCTGACCACCCATCAGAGGACACATACCGGCGAGAAGC |
| | | CTTATAAATGCCCCGAATGTGGAAAGAGCTTCTCCAGAAGCGACCATCTG |
| | | ACCAACCACCAGAGGACCCATACCGGAGAAAAACCTTACAAATGCCCCGA |
| | | GTGTGGAAAGTCCTTCAGCTCCCCCGCCGATCTGACAAGACATCAGAGAA |
| | | CCCACACCGGCGAAAAACCTTATAAATGTCCCGAGTGTGGCAAAAGCTTC |
| | | TCCGACAAGAAGGATCTGACAAGACACCAAAGGACCCACACCGGCGAGAA |
| | | ACCTTATAAATGTCCCGAATGCGGAAAAAGCTTTAGCAGAAACGACGCTC |
| | | TGACCGAACACCAGAGAACACATACCGGAGAGAAACCCTATAAATGTCCC |
| | | GAGTGCGGAAAATCCTTCAGCACCACCGGCGCTCTGACAGAGCATCAGAG |
| | | GACACACACCGGCAAAAAGACCTCCGCTAGCGGCAGCGGCGGCGGCAGCG |
| | | GCGGCGAGGAGCCCGAGGAGCCCGCCGATAGCGGACAATCTCTGGTGCCC |
| | | GTCTACATCTACAGCCCCGAATATGTGAGCATGTGTGATTCCCTCG |
| | | CCAAGATCCCTAAGAGAGCCAGCATGGTGCATTCTCTGATCGAGGCCTAC |
| | | GCTCTGCATAAGCAAATGAGGATCGTGAAGCCCAAGGTCGCCAGCATGGA |
| | | AGAGATGGCCACCTTTCACACCGATGCCTACCTCCAACATCTCCAGAAGG |
| | | TGTCCCAAGAGGGCGACGACGACCACCCCGACTCCATTGAGTACGGACTG |
| | | GGCTATGATTGCCCCGCCACCGAGGGCATCTTTGACTATGCCGCCGCTAT |
| | | CGGCGGAGCTACCATCACAGCCGCCCAGTGTCTGATTGATGGCATGTGCA |
| | | AGGTCGCCATCAACTGGTCCGGAGGCTGGCATCATGCCAAGAAGGATGAG |
| | | GCCTCCGGCTTCTGTTATCTGAATGACGCCGTGCTGGGCATTCTGAGACT |
| | | GAGGAGGAAATTCGAGAGGATTCTGTACGTGGATCTGGATCTGCATCACG |
| | | GAGATGGAGTCGAAGATGCCTTCAGCTTCACCAGCAAGGTGATGACAGTC |
| | | TCTCTGCACAAGTTCTCCCCCGGCTTCTTTCCCGGAACCGGCGACGTGTC |
| | | CGACGTGGGACTGGGCAAGGGAAGGTACTACAGCGTGAACGTGCCCATTC |
| | | AAGACGGCATCCAAGACGAGAAGTACTACCAGATCTGCGAGTCCGTGCTC |
| | | AAGGAGGTCTACCAAGCCTTCAATCCTAAGGCTGTCGTGCTCCAACTGGG |
| | | AGCTGATACCATTGCTGGCGATCCCATGTGCAGCTTCAATATGACACCCG |
| | | TCGGAATCGGCAAGTGCCTCAAGTACATCCTCCAGTGGCAGCTCGCCACC |
| | | CTCATTCTCGGAGGAGGCGGATACAATCTGGCTAATACCGCCAGATGCTG |
| | | GACCTATCTGACCGGCGTGATTCTGGGCAAAACACTGAGCAGCGAAATCC |
| | | CCGACCACGAGTTTTTCACCGCTTACGGCCCCGACTACGTGCTGGAGATC |
| | | ACCCCCAGCTGCAGACCCGATAGAAACGAACCCCATAGAATCCAGCAAAT |
| | | TCTGAACTATATCAAGGGCAACCTCAAGCACGTCGTGGGAGGTGGCGGAT |
| | | CGGGAAAGCGGCCCGCCGCCACCAAGAAGGCCGGTCAGGCCAAGAAGAAG |
| | | AAGGGCAGCTACCCCTACGACGTGCCCGACTACGCCTGAGCGGCCGCTTA |
| | | ATTAAGCTGCCTTCTGCGGGGCTTGCCTTCTGGCCATGCCCTTCTTCTCT |
| | | CCCTTGCACCTGTACCTCTTGGTCTTTGAATAAAGCCTGAGTAGGAAGTC |
| | | TAGAAAAAAAAAAAAAAAAAAAAAAAAAAAAAAAAAAAAAAAAAAAAAAA |
| | | AAAAAAAAAAAAAAAAAAAAAAAAAAAAAAAAA |
| MR- | CXCL1 ZF1- | AGGAAATAAGAGAGAAAAGAAGAGTAAGAAGAAATATAAGAGCCACCATG |
| 29780 | HDAC8 SP6 | GCCCCCAAGAAGAAGCGGAAGGTGGGCATCCACGGCGTGCCCGCCGCCGG |
| (SEQ ID | | CAGCAGCGGATCCCTGGAGCCCGGCGAAAAGCCTTACAAATGTCCCGAAT |
| NO: 242) | | GCGGAAAGAGCTTCAGCAGAGCCGACAATCTGACCGAACATCAGAGAACC |
| | | CATACCGGAGAAAAACCTTACAAATGTCCCGAGTGCGGCAAAAG |
| | | CTTCTCCCAAGCCGGACATCTGGCCAGCCACCAAAGGACACATACCGGCG |
| | | AGAAACCCTACAAGTGCCCCGAGTGCGGCAAGTCCTTCTCTAGATCCGAT |
| | | GAGCTGGTCAGACATCAGAGAACCCATACCGGCGAGAAGCCTTATAAGTG |
| | | CCCCGAATGTGGCAAGTCCTTCAGCCAGAGAGCTCATCTGGAGAGGCATC |
| | | AAAGAACACACACCGGAGAGAAACCTTACAAGTGTCCCGAGTGTGGAAAG |
| | | AGCTTCTCCAGAAGGGACGAGCTGAACGTCCACCAAAGAACCCATACCGG |
| | | CGAAAAGCCCTATAAATGCCCCGAGTGTGGAAAATCCTTTTCTAGATCCG |
| | | ACCATCTGACAACCCACCAGAGGACCCATACCGGAGAGAAGCCCTACAAA |
| | | TGCCCCGAGTGTGGAAAAAGCTTCTCTAGAAACGATGCTCTGACAGAGCA |
| | | CCAAAGGACCCACACCGGCAAAAAGACCAGCGCTAGCGGCAGCGGCGGCG |
| | | GCAGCGGCGGCGAGGAGCCCGAGGAGCCCGCCGATAGCGGACAATCTCTG |
| | | GTGCCCGTCTACATCTACAGCCCCGAATATGTGAGCATGTGTGATTCCCT |
| | | CGCCAAGATCCCTAAGAGAGCCAGCATGGTGCATTCTCTGATCGAGGCCT |
| | | ACGCTCTGCATAAGCAAATGAGGATCGTGAAGCCCAAGGTCGCCAGCATG |
| | | GAAGAGATGGCCACCTTTCACACCGATGCCTACCTCCAACATCTCCAGAA |
| | | GGTGTCCCAAGAGGGCGACGACGACCACCCCGACTCCATTGAGTACGGAC |
| | | TGGGCTATGATTGCCCCGCCACCGAGGGCATCTTTGACTATGCCGCCGCT |
| | | ATCGGCGGAGCTACCATCACAGCCGCCCAGTGTCTGATTGATGGCATGTG |
| | | CAAGGTCGCCATCAACTGGTCCGGAGGCTGGCATCATGCCAAGAAGGATG |
| | | AGGCCTCCGGCTTCTGTTATCTGAATGACGCCGTGCTGGGCATTCTGAGA |
| | | CTGAGGAGGAAATTCGAGAGGATTCTGTACGTGGATCTGGATCTGCATCA |
| | | CGGAGATGGAGTCGAAGATGCCTTCAGCTTCACCAGCAAGGTGATGACAG |
| | | TCTCTCTGCACAAGTTCTCCCCCGGCTTCTTTCCCGGAACCGGCGACGTG |
| | | TCCGACGTGGGACTGGGCAAGGGAAGGTACTACAGCGTGAACGTGCCCAT |
| | | TCAAGACGGCATCCAAGACGAGAAGTACTACCAGATCTGCGAGTCCGTGC |
| | | TCAAGGAGGTCTACCAAGCCTTCAATCCTAAGGCTGTCGTGCTCCAACTG |
| | | GGAGCTGATACCATTGCTGGCGATCCCATGTGCAGCTTCAATATGACACC |
| | | CGTCGGAATCGGCAAGTGCCTCAAGTACATCCTCCAGTGGCAGCTCGCCA |
| | | CCCTCATTCTCGGAGGAGGCGGATACAATCTGGCTAATACCGCCAGATGC |
| | | TGGACCTATCTGACCGGCGTGATTCTGGGCAAAACACTGAGCAGCGAAAT |
| | | CCCCGACCACGAGTTTTTCACCGCTTACGGCCCCGACTACGTGCTGGAGA |
| | | TCACCCCCAGCTGCAGACCCGATAGAAACGAACCCCATAGAATCCAGCAA |
| | | ATTCTGAACTATATCAAGGGCAACCTCAAGCACGTCGTGGGAGGTGGCGG |
| | | ATCGGGAAAGCGGCCCGCCGCCACCAAGAAGGCCGGTCAGGCCAAGAAGA |
| | | AGAAGGGCAGCTACCCCTACGACGTGCCCGACTACGCCTGAGCGGCCGCT |
| | | TAATTAAGCTGCCTTCTGCGGGGCTTGCCTTCTGGCCATGCCCTTCTTCT |
| | | CTCCCTTGCACCTGTACCTCTTGGTCTTTGAATAAAGCCTGAGTAGGAAG |
| | | TCTAGAAAAAAAAAAAAAAAAAAAAAAAAAAAAAAAAAAAAAAAAAAAAA |
| | | AAAAAAAAAAAAAAAAAAAAAAAAAAAAAAAAAAA |

[0234] In some embodiments, a nucleic acid for use in a method or composition described herein (e.g., a nucleic acid encoding a site-specific disrupting agent) comprises a nucleic acid sequence of any one of SEQ ID NOs: 69, 71, 85, 201, 202, 204, 205, 207, 209, 211, 213, 215, 217, or 219-242, a complementary or reverse complementary sequence of any thereof, or comprises a sequence with at least 80, 85, 90, 91, 92, 93, 94, 95, 96, 97, 98, or 99% identity to any thereof. In some embodiments, a site-specific disrupting agent for use in a method or composition described herein comprises an amino acid sequence of any one of SEQ ID NOs: 70, 72-82, 84, 86, 203, 206, 208, 210, 212, 214, 216, or 218, or comprises a sequence with at least 80, 85, 90, 91, 92, 93, 94, 95, 96, 97, 98, or 99% identity to any thereof. In some embodiments, a site-specific disrupting agent for use in a method or composition described herein comprises an amino acid sequence encoded by any one of SEQ ID NOs: 69, 71, 85, 201, 202, 204, 205, 207, 209, 211, 213, 215, 217, or 219-242, or an amino acid sequence with at least 80, 85, 90, 91, 92, 93, 94, 95, 96, 97, 98, or 99% identity to any thereof.

[0235] Functional Characteristics

[0236] A site-specific disrupting agent or a system of the present disclosure can be used to modulate, e.g., decrease, expression of a target plurality of genes in a cell. In some embodiments, modulating expression comprises decreasing the level of RNA, e.g., mRNA, encoded by each of the target plurality of genes. In some embodiments, modulating expression comprises decreasing the level of protein encoded by each of the target plurality of genes. In some embodiments, modulating expression comprises both decreasing the level of mRNA and protein encoded by each of the target plurality of genes. In some embodiments, the expression of a gene of the target plurality of genes in a cell contacted by or comprising the site-specific disrupting agent is at least 1.05× (i.e., 1.05 times), 1.1×, 1.15×, 1.2×, 1.25×, 1.3×, 1.35×, 1.4×, 1.45×, 1.5×, 1.55×, 1.6×, 1.65×, 1.7×, 1.75×, 1.8×, 1.85×, 1.9×, 1.95×, 2×, 3×, 4×, 5×, 6×, 7×, 8×, 9×, 10×, 20×, 30×, 40×, 50×, 60×, 70×, 80×, 90×, or 100× lower than the level of expression of the gene in a cell not contacted by or comprising the site-specific disrupting agent or system. In some embodiments, the expression of each gene of the target plurality of genes in a cell contacted by or comprising the site-specific disrupting agent or system is at least 1.05× (i.e., 1.05 times), 1.1×, 1.15×, 1.2×, 1.25×, 1.3×, 1.35×, 1.4×, 1.45×, 1.5×, 1.55×, 1.6×, 1.65×, 1.7×, 1.75×, 1.8×, 1.85×, 1.9×, 1.95×, 2×, 3×, 4×, 5×, 6×, 7×, 8×, 9×, 10×, 20×, 30×, 40×, 50×, 60×, 70×, 80×, 90×, or 100× lower than the level of expression of the gene in a cell not contacted by or comprising the site-specific disrupting agent or system. Expression of a gene may be assayed by methods known to those of skill in the art, including RT-PCR, ELISA, Western blot, and the methods of Examples 2 or 4-19.

[0237] A site-specific disrupting agent or a system of the present disclosure can be used to decrease binding of a nucleating polypeptide, e.g., CTCF, to an anchor sequence. In some embodiments, contacting a cell or administering a site-specific disrupting agent or a system results in a decrease in binding of a nucleating polypeptide, e.g., CTCF, to an anchor sequence (e.g., an anchor sequence of an ASMC comprising a target plurality of genes). In some embodiments, contacting a cell or administering a site-specific disrupting agent or a system results in a complete loss of binding or a decrease of at least 50, 60, 70, 80, 90, 95, or 99%, e.g., as measured by ChIP and/or quantitative PCR, relative to the binding of the nucleating polypeptide (e.g., CTCF) to the anchor sequence prior to treatment with the site-specific disrupting agent or a system or in the absence of the site-specific disrupting agent or a system.

[0238] A site-specific disrupting agent or a system of the present disclosure can be used to disrupt a genomic complex (e.g., ASMC) comprising a target plurality of cells. In some embodiments, contacting a cell or administering a site-specific disrupting agent or a system results in a decrease in the level of a genomic complex (e.g., ASMC) comprising the target plurality of genes relative to the level of the complex prior to treatment with the site-specific disrupting agent or a system or in the absence of the site-specific disrupting agent or a system. In some embodiments, contacting a cell or administering a site-specific disrupting agent or a system results in a complete loss of the genomic complex, e.g., ASMC, or a decrease of at least 25, 30, 35, 40, 45, 50, 60, 70, 80, 90, 95, or 99%, e.g., as measured by ChIA-PET, ELISA (e.g., to assess gene expression changes), CUT&RUN, ATAC-SEQ, ChIP and/or quantitative PCR, relative to the level of the complex prior to treatment with the site-specific disrupting agent or a system or in the absence of the site-specific disrupting agent or a system.

[0239] A site-specific disrupting agent or a system of the present disclosure can be used to modulate, e.g., decrease, expression of a target plurality of genes in a cell for a time period. In some embodiments, the expression of a gene of the target plurality of genes in a cell contacted by or comprising the site-specific disrupting agent or a system is appreciably decreased for at least 1, 2, 3, 4, 5, 6, 7, 8, 9, 10, 11, 12, 13, 14, 15, 16, 17, 18, 19, 20, 21, 22, 23, or 24 hours, or at least 1, 2, 3, 4, 5, 6, 7, 10, or 14 days, or at least 1, 2, 3, 4, or 5 weeks, or at least 1, 2, 3, 4, 5, 6, 7, 8, 9, 10, 11, or 12 months, or at least 1, 2, 3, 4, or 5 years (e.g., indefinitely). In some embodiments, the expression of each gene of the target plurality of genes in a cell contacted by or comprising the site-specific disrupting agent or a system is appreciably decreased for at least 1, 2, 3, 4, 5, 6, 7, 8, 9, 10, 11, 12, 13, 14, 15, 16, 17, 18, 19, 20, 21, 22, 23, or 24 hours, or at least 1, 2, 3, 4, 5, 6, 7, 10, or 14 days, or at least 1, 2, 3, 4, or 5 weeks, or at least 1, 2, 3, 4, 5, 6, 7, 8, 9, 10, 11, or 12 months, or at least 1, 2, 3, 4, or 5 years (e.g., indefinitely). Optionally, the expression of a gene of the target plurality of genes in a cell contacted by or comprising the site-specific disrupting agent or a system is appreciably decreased for no more than 10, 9, 8, 7, 6, 5, 4, 3, 2, or 1 years. Optionally, the expression of each gene of the target plurality of genes in a cell contacted by or comprising the site-specific disrupting agent or a system is appreciably decreased for no more than 10, 9, 8, 7, 6, 5, 4, 3, 2, or 1 years.

[0240] A site-specific disrupting agent or a system may comprise a plurality of effector moieties, where each effector moiety has a different functionality from each other effector moiety. For example, a site-specific disrupting agent or a system may comprise a first effector moiety comprising histone deacetylase functionality and a second effector moiety comprising DNA methyltransferase functionality. In some embodiments, a site-specific disrupting agent comprises a combination of effector moieties whose functionalities are complementary to one another with regard to modulating, e.g., decreasing, expression of a target plurality of genes, e.g., where the functionalities together decrease expression and, optionally, do not decrease or negligibly decrease expression when present individually.

[0241] In some embodiments, a site-specific disrupting agent or a system comprises a combination of effector moieties whose functionalities synergize with one another with regard to modulating, e.g., decreasing, expression of a target plurality of genes. Without wishing to be bound by theory, it is thought that epigenetic modifications to a genomic locus are cumulative, in that multiple repressive epigenetic markers (e.g., multiple different types of epigenetic markers and/or more extensive marking of a given type) together reduce expression more effectively than individual modifications alone (e.g., producing a greater decrease in expression and/or a longer-lasting decrease in expression). In some embodiments, a site-specific disrupting agent or a system comprises a plurality of effector moieties that synergize with each other, e.g., each effector moiety decreases expression of a target gene. In some embodiments, a site-specific disrupting agent comprising a plurality of different effector moieties which synergize with one another is more effective at modulating, e.g., decreasing, expression of a target plurality of genes than a site-specific disrupting agent comprising only one of the plurality of different effector moieties or a non-synergistic combination of effector moieties. In some embodiments, such a site-specific disrupting agent is at least 1.05× (i.e., 1.05 times), 1.1×, 1.15×, 1.2×, 1.25×, 1.3×, 1.35×, 1.4×, 1.45×, 1.5×, 1.55×, 1.6×, 1.65×, 1.7×, 1.75×, 1.8×, 1.85×, 1.9×, 1.95×, 2×, 3×, 4×, 5×, 6×, 7×, 8×, 9×, 10×, 20×, 30×, 40×, 50×, 60×, 70×, 80×, 90×, or 100× as effective at modulating, e.g., decreasing, expression of a target plurality of genes than a site-specific disrupting agent or a system comprising only one of the plurality of different effector moieties or a non-synergistic combination of effector moieties.

### Target Sites

[0242] A site-specific disrupting agent or a system disclosed herein is useful for modulating, e.g., decreasing, expression of a target plurality of genes in cell, e.g., in a subject or patient. A target plurality of genes may include any gene known to those of skill in the art. A target plurality of genes comprises at least two genes. In some embodiments, a targeted plurality of genes comprises at least 2, 3, 4, 5, 6, 7, 8, 9, 10, 11, 12, 13, 14, 15, 16, 17, 18, 19, or 20 genes (and optionally, no more than 2, 3, 4, 5, 6, 7, 8, 9, 10, 11, 12, 13, 14, 15, 16, 17, 18, 19, 20, or 30 genes), e.g., a first gene and a second gene, and optionally a third gene, a fourth gene, a fifth gene, a sixth gene, a seventh gene, an eighth gene, a ninth gene, a tenth gene, an eleventh gene, a twelfth gene, a thirteenth gene, a fourteenth gene, a fifteenth gene, a sixteenth gene, a seventeenth gene, an eighteenth gene, a nineteenth gene, and/or a twentieth gene. In some embodiments, a targeted plurality of genes comprises 2-20, 2-18, 2-16, 2-14, 2-12, 2-10, 2-9, 2-8, 2-7, 2-6, 2-5, 2-4, 2-3, 3-20, 3-18, 3-16, 3-14, 3-12, 3-10, 3-9, 3-8, 3-7, 3-6, 3-5, 3-4, 4-20, 4-18, 4-16, 4-14, 4-12, 4-10, 4-9, 4-8, 4-7, 4-6, 4-5, 5-20, 5-18, 5-16, 5-14, 5-12, 5-10, 5-9, 5-8, 5-7, 5-6, 6-20, 6-18, 6-16, 6- 14, 6-12, 6-10, 6-9, 6-8, 6-7, 7-20, 7-18, 7-16, 7-14, 7-12, 7-10, 7-9, 7-8, 8-20, 8-18, 8-16, 8-14, 8-12, 8-10, 8-9, 9-20, 9-18, 9-16, 9-14, 9-12, 9-10, 10-20, 10-18, 10-16, 10-14, 10-12, 12-20, 12-18, 12-16, 12-14, 14-20, 14-18, 14-16, 16-20, 16-18, or 18-20 genes.

[0243] In some embodiments, two or more (e.g., all) genes of a target plurality of genes are associated with a disease or condition in a subject, e.g., a mammal, e.g., a human, bovine, horse, sheep, chicken, rat, mouse, cat, or dog. In some embodiments, the disease or condition is an inflammatory disease, e.g., an immune mediated inflammatory disease. In some embodiments, the disease or condition is one or more of rheumatoid arthritis, inflammatory, arthritis, gout, asthma, neutrophilic asthma, neutrophilic dermatosis, paw edema, acute respiratory disease syndrome (ARDS), COVID-19, psoriasis, inflammatory bowel disease, infection (e.g., by a pathogen, e.g., a bacteria, a virus, or a fungus), external injury (e.g., scrapes or foreign objects), effects of radiation or chemical injury, osteoarthritis, osteoarthritic joint pain, joint pain, inflammatory pain, acute pain, chronic pain, cystisis, bronchitis, dermatitis, cardiovascular disease, neurodegenerative disease, liver disease, lung disease, kidney disease, pain, swelling, stiffness, tenderness, redness, warmth, or elevated biomarkers related to disease states (e.g., cytokines, immune receptors, or inflammatory markers). In some embodiments, the inflammatory disorder is associated with an infection, e.g., by a virus, e.g., Sars-Cov-2 virus. In some embodiments, the inflammatory disorder is an autoimmune disorder. In some embodiments, the inflammatory disorder is associated with hypoxia. In some embodiments, the inflammatory disorder is associated with ARDS, hypoxia, and/or sepsis. In some embodiments, the infection is a super infection, e.g., caused by more than one pathogen, e.g., a first virus or a bacterium, or a fungus, and a second virus, or a bacterium, or a fungus. In some embodiments, the inflammatory disorder may change lung cell composition, e.g., decreased AT2 cells and/or increased dendritic cell, macrophages, neutrophils, NK cells, fibroblasts, leukocytes, lymphatic endothelial cells and/or vascular endothelial cells. In some embodiments, the disorder is associated with one or more comorbidities, e.g., respiratory infections, obesity, gastroesophageal reflux disease, skin lesions, and/or obstructive sleep apnea.

[0244] In some embodiments, two or more (e.g., all) genes of a target plurality of genes are aberrantly expressed, e.g., over-expressed, in a cell, e.g., in a subject, e.g., a human subject.

[0245] In some embodiments, two or more (e.g., all) genes of a target plurality of genes have related functionalities. Without wishing to be bound by theory, it is thought that genes with related functionalities are frequently positioned in close proximity to one another in the genome and are also frequently found within (wholly or in part) common genomic complexes, e.g., ASMCs. Modulating, e.g., decreasing, expression of a target plurality of genes where two or more (e.g., all) of the genes of the plurality have related functionalities may be accomplished efficiently and effectively by targeting a genomic complex, e.g., ASMC, comprising said interrelated genes.

[0246] In some embodiments, one, two, three, or more (e.g., all) genes of a target plurality of genes are cytokines, e.g., chemokines, an interleukin, a transcription factor (e.g., an interferon regulatory transcription factor), intercellular adhesion molecule (ICAM), or an interferon receptor. In some embodiments, two or more (e.g., all) genes of a target plurality of genes are cytokines, an interleukin, a transcription factor (e.g., an interferon regulatory transcription factor), intercellular adhesion molecule (ICAM), or an interferon receptor. In some embodiments, the target plurality of genes are mammalian gene, e.g., mouse genes, human genes.

[0247] In some embodiments, two or more (e.g., all) genes of a target plurality of genes have pro-inflammatory functionality. In some embodiments, two or more (e.g., all) genes of a target plurality of genes may act as a chemoattractant for immune cells, e.g., neutrophils. For example, genes having pro-inflammatory functionality (also referred to herein as pro-inflammatory genes) include CXCL1, CXCL2, CXCL3, CXCL4, CXCL5, CXCL6, CXCL7, IL8, CXCL15, CCL2, CCL7, CCL9, IL1A, IL1B, CSF2, IRF1, ICAM1, ICAM4, ICAM5, IFNAR2, IL10RB, or IFNGR2. In some embodiments, a target plurality of genes comprises two or more of CXCL1, CXCL2, CXCL3, CXCL4, CXCL5, CXCL6, CXCL7, IL8, CXCL15, CCL2, CCL7, CCL9, IL1A, IL1B, CSF2, IRF1, ICAM1, ICAM4, ICAM5, IFNAR2, IL10RB, or IFNGR2. In some embodiments, the plurality of genes comprises one or more genes more human CXCL family. In some embodiments, a target plurality of genes comprises CXCL1 (e.g., nucleic acid sequence encoding an RNA according to NM_002089 or a nucleic acid encoding a polypeptide according to P09341, or a mutant thereof), CXCL2 (e.g., nucleic acid sequence encoding an RNA according to NM_001511 or a nucleic acid encoding a polypeptide according to P19875, or a mutant thereof), CXCL3 (e.g., nucleic acid sequence encoding an RNA according to NM_002090 or a nucleic acid encoding a polypeptide according to P19876, or a mutant thereof), CXCL4 (e.g., nucleic acid sequence encoding an RNA according to NM_002619 or NM_001363352, or a nucleic acid encoding a polypeptide according to P02776, or a mutant thereof), CXCL5 (e.g., nucleic acid sequence encoding an RNA according to NM_002994 or a nucleic acid encoding a polypeptide according to P42830, or a mutant thereof), CXCL6 (e.g., nucleic acid sequence encoding an RNA according to NM_002993 or a nucleic acid encoding a polypeptide according to P80162, or a mutant thereof), CXCL7 (e.g., nucleic acid sequence encoding an RNA according to NM_002704 or a nucleic acid encoding a polypeptide according to P02775, or a mutant thereof), and IL8 (e.g., nucleic acid sequence encoding an RNA according to NM_000584 or NM_001354840, or a nucleic acid encoding a polypeptide according to P10145, or a mutant thereof). In some embodiments, the plurality of genes comprises one or more genes more mouse CXCL family. In some embodiments, a target plurality of genes comprises CXCL1 (e.g., nucleic acid sequence encoding an RNA according to NM_008176.3 or a nucleic acid encoding a polypeptide according to P12850, or a mutant thereof), CXCL2 (e.g., nucleic acid sequence encoding an RNA according to NM_009140.2 or a nucleic acid encoding a polypeptide according to P10889, or a mutant thereof), CXCL3 (e.g., nucleic acid sequence encoding an RNA according to NM_203320.3 or a nucleic acid encoding a polypeptide according to Q6W5C0, or a mutant thereof), CXCL4 (e.g., nucleic acid sequence encoding an RNA according to NM_019932 or a nucleic acid encoding a polypeptide according to Q9Z126, or a mutant thereof), CXCL5 (e.g., nucleic acid sequence encoding an RNA according to NM_009141.3 or a nucleic acid encoding a polypeptide according to P50228, or a mutant thereof), CXCL7 (e.g., nucleic acid sequence encoding an RNA according to NM_023785.3 or a nucleic acid encoding a polypeptide according to Q9EQI5, or a mutant thereof), and CXCL15 (e.g., nucleic acid sequence encoding an RNA according to NM_011339 or a nucleic acid encoding a polypeptide according to Q9WVL7, or a mutant thereof). In some embodiments, a target plurality of genes comprises CCL2, CCL7, CCL9, IL1A, and IL1B. In some embodiments, a target plurality of genes comprises CSF2, IRF1, ICAM1, ICAM4, and ICAM5. In some embodiments, a target plurality of genes comprises IFNAR2, IL10RB, and IFNGR2.

[0248] In some embodiments, inhibition expression of two or more (e.g., all) genes of a target plurality of genes may modulate expression of other genes encoding a protein, e.g., cytokines, e.g., decreasing CXCL expression and cellular recruitment of CXCL to the site of inflammation, reduces presence of GM-CSF, and/or IL-6 in the site of inflammation.

[0249] In some embodiments, a target plurality of genes is part of a genomic complex, e.g., ASMC. As used herein, referring to a target plurality of genes being part of a genomic complex, e.g., ASMC, means that each of the genes of the plurality are at least partly comprised within the genomic complex, e.g., ASMC. Referring to a target plurality of genes as part of a genomic complex, e.g., ASMC, is used interchangeably with reference to a genomic complex, e.g., ASMC, comprising a target plurality of genes. For example, a target plurality of genes may consist of two genes positioned adjacent one another in the genome wherein a first anchor sequence is disposed within the first of the genes and a second anchor sequence is disposed outside of the second of the genes distal to the first gene. An ASMC formed by association of said first and second anchor sequence would wholly comprise the second of the genes and partly comprise the first of the genes; a plurality of genes consisting of these two genes would be part of this ASMC. In some embodiments, each gene of a target plurality of genes is wholly within a genomic complex, e.g., ASMC, (e.g., no portion of the transcript encoding gene sequence is outside of the genomic complex, e.g., ASMC). In some embodiments, each gene of a target plurality of genes is partly within a genomic complex, e.g., ASMC, (e.g., some portion of the transcript encoding gene sequence is outside of the genomic complex, e.g., ASMC). In some embodiments, at least one gene of a target plurality of genes is wholly within a genomic complex, e.g., ASMC, (e.g., no portion of the transcript encoding gene sequence is outside of the genomic complex, e.g., ASMC), and at least one gene of a target plurality of genes is partly within a genomic complex, e.g., ASMC, (e.g., some portion of the transcript encoding gene sequence is outside of the genomic complex, e.g., ASMC).

[0250] A gene of a target plurality of genes may include coding sequences, e.g., exons, and/or non-coding sequences, e.g., introns, 3′UTR, or 5′UTR. In some embodiments, a gene of a target plurality of genes is operably linked to a transcription control element. In some embodiments, a transcription control element of a gene of a target plurality of genes is also part of the genomic complex, e.g., ASMC, that the gene is part of. Referring to a transcription control element operably linked to a gene as part of a genomic complex, e.g., ASMC, can be understood in the same sense as described above in reference to the target plurality of genes. In some embodiments, each transcription control element operably linked to a gene of a target plurality of genes is wholly within a genomic complex, e.g., ASMC, (e.g., no portion of the transcription control element sequence is outside of the genomic complex, e.g., ASMC). In some embodiments, each transcription control element of a target plurality of genes is partly within a genomic complex, e.g., ASMC, (e.g., some portion of the transcription control element sequence is outside of the genomic complex, e.g., ASMC). In some embodiments, each transcription control element of a target plurality of genes is completely outside of the genomic complex, e.g., ASMC, (e.g., each transcription control element sequence is outside of the genomic complex, e.g., ASMC). In some embodiments, at least one transcription control element operably linked to a gene of a target plurality of genes is wholly within a genomic complex, e.g., ASMC (e.g., no portion of the transcription control element sequence is outside of the genomic complex, e.g., ASMC). In some embodiments, at least one transcription control element operably linked to another gene of the target plurality of genes is partly within the genomic complex, e.g., ASMC, (e.g., some portion of the transcript encoding gene sequence is outside of the genomic complex, e.g., ASMC). In some embodiments, at least one transcription control element operably linked to a gene of a target plurality of genes is completely outside of the genomic complex, e.g., ASMC.

[0251] In some embodiments, a site-specific disrupting agent or a system targets a target plurality of genes by binding to an anchor sequence, e.g., an anchor sequence that is part of a genomic complex (e.g., ASMC) comprising the target plurality of genes. In some embodiments, a targeting moiety binds to the anchor sequence. In some embodiments, binding of a genomic complex component, e.g., nucleating polypeptide, to an anchor sequence nucleates complex formation, e.g., anchor sequence-mediated conjunction formation. Each anchor sequence-mediated conjunction comprises one or more anchor sequences, e.g., a plurality of anchor sequences. In some embodiments, an anchor sequence-mediated conjunction can be disrupted to alter, e.g., inhibit, expression of a target plurality of genes. Such disruptions may modulate gene expression by, e.g., changing topological structure of DNA, e.g., by modulating the ability of a gene of the plurality to interact with a transcription control element (e.g., enhancing and silencing/repressive sequences).

[0252] A targeting moiety suitable for use in a site-specific disrupting agent or a system may bind, e.g., specifically bind, to a site that is proximal to an anchor sequence, e.g., an anchor sequence that is part of a genomic complex (e.g., ASMC) comprising the target plurality of genes. As used herein, proximal refers to a closeness of two sites, e.g., nucleic acid sites, such that binding of a site-specific disrupting agent or a system at the first site and/or modification of the first site by the site-specific disrupting agent will produce the same or substantially the same effect as binding and/or modification of the other site. For example, a targeting moiety may bind to a first site that is proximal to an anchor sequence that is part of a genomic complex (e.g., ASMC) comprising the target plurality of genes (the second site), and an effector moiety associated with said targeting moiety may epigenetically modify the first site such that genomic complex (e.g., ASMC) comprising the anchor sequence is modified, substantially the same as if the second site had been bound and/or modified. In some embodiments, a site proximal to a target gene (e.g., an exon, intron, or splice site within the target gene), proximal to a transcription control element operably linked to the target gene, or proximal to an anchor sequence is within 5000, 4000, 3000, 2000, 1000, 900, 800, 700, 600, 500, 400, 300, 200, 100, 50, 40, 30, 25, 20, 15, 10, or 5 base pairs from the target gene (e.g., an exon, intron, or splice site within the target gene), transcription control element, or anchor sequence (and optionally at least 5, 10, 20, 25, 50, 100, 200, or 300 base pairs from the target gene (e.g., an exon, intron, or splice site within the target gene), transcription control element, or anchor sequence). In some embodiments, a site proximal to an anchor sequence is a site that is less than 1000, 900, 800, 700, 600, 500, 400, 300, 200, 100, 50, 40, 30, 20, 10, or 5 base pairs from the anchor sequence (and optionally at least 5, 10, 20, 25, 50, 100, 200, or 300 base pairs). In some embodiments, a site proximal to an anchor sequence is a site that is less than 800, 700, 600, 500, 400, or 300 base pairs from the anchor sequence (and optionally at least 5, 10, 20, 25, 50, 100, 200, or 300 base pairs).

[0253] A targeting moiety suitable for use in a site-specific disrupting agent or a system described herein may bind, e.g., specifically bind, to a site comprising at least 10, 11, 12, 13, 14, 15, 16, 17, 18, 19, 20, 21, 22, 23, 24, 25, 26, 27, 28, 29, 30, 31, 32, 33, 34, 35, 36, 37, 38, 39, 40, 41, 42, 43, 44, 45, 46, 47, 48, 49, or 50 nucleotides or base pairs (and optionally no more 50, 49, 48, 47, 46, 45, 44, 43, 42, 41, 40, 39, 38, 37, 36, 35, 34, 33, 32, 31, 30, 29, 28, 27, 26, 25, 24, 23, 22, 21, 20, 19, 18, 17, 16, 15, 14, 13, 12, 11, or 10 nucleotides or base pairs). In some embodiments, a targeting moiety binds to a site comprising 10, 11, 12, 13, 14, 15, 16, 17, 18, 19, 20, 21, 22, 23, 24, 25, 26, 27, 28, 29, 30, 31, 32, 33, 34, 35, 36, 37, 38, 39, 40, 41, 42, 43, 44, 45, 46, 47, 48, 49, or 50 nucleotides or base pairs.

### Genomic Complexes

[0254] Genomic complexes relevant to the present disclosure include stable structures that comprise a plurality of polypeptide and/or nucleic acid (particularly ribonucleic acid) components and that co-localize two or more genomic sequence elements (e.g., anchor sequences, promoter and/or enhancer elements). In some embodiments, relevant genomic complexes comprise anchor-sequence-mediated conjunctions (e.g., genomic loops). In some embodiments, genomic sequence elements that are (i.e., in three-dimensional space) in genomic complexes include transcriptional promoter and/or regulatory (e.g., enhancer or repressor) sequences. Alternatively, or additionally, in some embodiments, genomic sequence elements that are in genomic complexes include binding sites for one or more of CTCF, YY1, etc. In some embodiments, a genomic complex comprises a target plurality of genes. In some embodiments, two or more (e.g., all) genes of a target plurality of genes are located in a single loop of an ASMC. In some embodiments, two or more (e.g., all) genes of a target plurality of genes are located in different loops of an ASMC.

[0255] In some embodiments, a genomic complex whose incidence is decreased in accordance with the present disclosure comprises, or consists of, one or more components chosen from: a genomic sequence element (e.g., an anchor sequence, e.g., a CTCF binding motif, a YY1 binding motif, etc., that may, in some embodiments, be recognized by a nucleating component), one or more polypeptide components (e.g., one or more nucleating polypeptides, one or more transcriptional machinery proteins, and/or one or more transcriptional regulatory proteins), and/or one or more non-genomic nucleic acid components (e.g., non-coding RNA and/or an mRNA, for example, transcribed from a gene associated with the genomic complex).

[0256] In some embodiments, a genomic complex component is part of a genomic complex, wherein the genomic complex brings together two genomic sequence elements that are spaced apart from one another on a chromosome, e.g., via an interaction between and among a plurality of protein and/or other components.

[0257] In some embodiments, a genomic sequence element is an anchor sequences to which one or more protein components of the complex binds; thus, in some embodiments, a genomic complex comprises an anchor-sequence-mediated conjunction. In some embodiments, a genomic sequence element comprises a CTCF binding motif, a promoter and/or an enhancer. In some embodiments, a genomic sequence element includes at least one or both of a promoter and/or regulatory site (e.g., an enhancer). In some embodiments, complex formation is nucleated at the genomic sequence element(s) and/or by binding of one or more of the protein component(s) to the genomic sequence element(s).

[0258] Genomic sequence elements involved in genomic complexes as described herein, may be non-contiguous with one another. In some embodiments with noncontiguous genomic sequence elements (e.g., anchor sequences, promoters, and/or transcriptional regulatory sequences), a first genomic sequence element (e.g., anchor sequence, promoter, or transcriptional regulatory sequence) may be separated from a second genomic sequence element (e.g., anchor sequence, promoter, or transcriptional regulatory sequence) by about 500 bp to about 500 Mb, about 750 bp to about 200 Mb, about 1 kb to about 100 Mb, about 25 kb to about 50 Mb, about 50 kb to about 1 Mb, about 100 kb to about 750 kb, about 150 kb to about 500 kb, or about 175 kb to about 500 kb. In some embodiments, a first genomic sequence element (e.g., anchor sequence, promoter, or transcriptional, regulatory sequence) is separated from a second genomic sequence element (e.g., anchor sequence, promoter, or transcriptional regulatory sequence) by about 500 bp, 600 bp, 700 bp, 800 bp, 900 bp, 1 kb, 5 kb, 10 kb, 15 kb, 20 kb, 25 kb, 30 kb, 35 kb, 40 kb, 45 kb, 50 kb, 55 kb, 60 kb, 65 kb, 70 kb, 75 kb, 80 kb, 85 kb, 90 kb, 95 kb, 100 kb, 125 kb, 150 kb, 175 kb, 200 kb, 225 kb, 250 kb, 275 kb, 300 kb, 350 kb, 400 kb, 500 kb, 600 kb, 700 kb, 800 kb, 900 kb, 1 Mb, 2 Mb, 3 Mb, 4 Mb, 5 Mb, 6 Mb, 7 Mb, 8 Mb, 9 Mb, 10 Mb, 15 Mb, 20 Mb, 25 Mb, 50 Mb, 75 Mb, 100 Mb, 200 Mb, 300 Mb, 400 Mb, 500 Mb, or any size therebetween.

### Anchor Sequence-Mediated Conjunction

[0259] In some embodiments, a genomic complex relevant to the present disclosure is or comprises an anchor sequence-mediated conjunction (ASMC). In some embodiments, an anchor-sequence-mediated conjunction is formed when nucleating polypeptide(s) bind to anchor sequences in the genome and interactions between and among these proteins and, optionally, one or more other components, forms a conjunction in which the anchor sequences are physically co-localized. In many embodiments described herein, one or more genes is associated with an anchor-sequence-mediated conjunction; in such embodiments, the anchor sequence-mediated conjunction typically includes one or more anchor sequences, one or more genes, and one or more transcriptional control sequences, such as an enhancing or silencing sequence. In some embodiments, a transcriptional control sequence is within, partially within, or outside an anchor sequence-mediated conjunction. In some embodiments, the ASMC comprises an internal enhancing sequence, e.g., an enhancer. In some embodiments, an ASMC comprises a target plurality of genes.

[0260] In some embodiments, a genomic complex as described herein (e.g., an anchor sequence-mediated conjunction) is or comprises a genomic loop, such as an intra-chromosomal loop. In certain embodiments, genomic complex as described herein (e.g., an anchor sequence-mediated conjunction) comprises a plurality of genomic loops. One or more genomic loops may include a first anchor sequence, a nucleic acid sequence, a transcriptional control sequence, and a second anchor sequence. In some embodiments, at least one genomic loop includes, in order, a first anchor sequence, a transcriptional control sequence, and a second anchor sequence; or a first anchor sequence, a nucleic acid sequence, and a second anchor sequence. In yet some embodiments, either one or both of nucleic acid sequences and transcriptional control sequence is located within a genomic loop. In yet some embodiments, either one or both of nucleic acid sequences and transcriptional control sequence is located outside a genomic loop. In some embodiments, one or more genomic loops comprise a transcriptional control sequence. In some embodiments, genomic complex (e.g., an anchor sequence-mediated conjunction) includes a TATA box, a CAAT box, a GC box, or a CAP site.

[0261] In some embodiments, an anchor sequence-mediated conjunction comprises a plurality of genomic loops; in some such embodiments, an anchor sequence-mediated conjunction comprises at least one of an anchor sequence, a nucleic acid sequence, and a transcriptional control sequence in one or more genomic loops.

[0262] Types of Loops

[0263] In some embodiments, a genomic loop comprises one or more, e.g., 2, 3, 4, 5, or more, genes, e.g., a target plurality of genes. In some embodiments, two or more, e.g., 2, 3, 4, 5, or more, genes of the target plurality of genes are transcribed in the same direction. In some embodiments, all genes of the target plurality of genes are transcribed in the same direction.

[0264] In some embodiments, the present disclosure provides methods of modulating (e.g., decreasing) expression of a target plurality of genes in a loop comprising inhibiting, dissociating, degrading, and/or modifying a genomic complex that achieves co-localization of genomic sequences that are outside of, not part of, or comprised within (i) a gene whose expression is modulated (e.g. of a target plurality of genes); and/or (ii) one or more associated transcriptional control sequences that influence transcription of a gene whose expression is modulated.

[0265] In some embodiments, the present disclosure provides methods of modulating (e.g., decreasing) transcription of a target plurality of genes comprising inhibiting formation of and/or destabilizing a complex that achieves co-localization of genomic sequences that are non-contiguous with (i) a gene whose expression is modulated (e.g., of a target plurality of genes); and/or (ii) associated transcriptional control sequences that influence transcription of a gene whose expression is modulated.

In some embodiments, an anchor sequence-mediated conjunction is associated with one or more, e.g., 2, 3, 4, 5, or more, transcriptional control sequences. In some embodiments, a gene of a target plurality of genes (e.g., one, two, or more, e.g., all of the target plurality of genes) is non-contiguous with one or more transcriptional control sequences. In some embodiments where a gene is non-contiguous with its transcriptional control sequence(s), a gene may be separated from one or more transcriptional control sequences by about 100 bp to about 500 Mb, about 500 bp to about 200 Mb, about 1 kb to about 100 Mb, about 25 kb to about 50 Mb, about 50 kb to about 1 Mb, about 100 kb to about 750 kb, about 150 kb to about 500 kb, or about 175 kb to about 500 kb. In some embodiments, a gene is separated from a transcriptional control sequence by about 100 bp, 300 bp, 500 bp, 600 bp, 700 bp, 800 bp, 900 bp, 1 kb, 5 kb, 10 kb, 15 kb, 20 kb, 25 kb, 30 kb, 35 kb, 40 kb, 45 kb, 50 kb, 55 kb, 60 kb, 65 kb, 70 kb, 75 kb, 80 kb, 85 kb, 90 kb, 95 kb, 100 kb, 125 kb, 150 kb, 175 kb, 200 kb, 225 kb, 250 kb, 275 kb, 300 kb, 350 kb, 400 kb, 500 kb, 600 kb, 700 kb, 800 kb, 900 kb, 1 Mb, 2 Mb, 3 Mb, 4 Mb, 5 Mb, 6 Mb, 7 Mb, 8 Mb, 9 Mb, 10 Mb, 15 Mb, 20 Mb, 25 Mb, 50 Mb, 75 Mb, 100 Mb, 200 Mb, 300 Mb, 400 Mb, 500 Mb, or any size therebetween.

### Anchor Sequences

[0266] In general, an anchor sequence is a genomic sequence element to which a genomic complex component, e.g., nucleating polypeptide, binds specifically. In some embodiments, binding of a genomic complex component to an anchor sequence nucleates complex formation.

[0267] Each anchor sequence-mediated conjunction comprises one or more anchor sequences, e.g., a plurality. In some embodiments, anchor sequences can be manipulated or altered to form and/or stabilize naturally occurring loops, to form one or more new loops (e.g., to form exogenous loops or to form non-naturally occurring loops with exogenous or altered anchor sequences), or to inhibit formation of or destabilize naturally occurring or exogenous loops. Such alterations may modulate gene expression by, e.g., changing topological structure of DNA, e.g., by thereby modulating ability of a target gene to interact with gene regulation and control factors (e.g., enhancing and silencing/repressor sequences). In some embodiments, chromatin structure is modified by substituting, adding or deleting one or more nucleotides within an anchor sequence-mediated conjunction. In some embodiments, chromatin structure is modified by substituting, adding, or deleting one or more nucleotides within an anchor sequence of an anchor sequence-mediated conjunction.

[0268] In some embodiments, an anchor sequence comprises a common nucleotide sequence, e.g., a CTCF-binding motif: N(T/C/G)N(G/A/T)CC(A/T/G)(C/G)(C/T/A)AG(G/A)(G/T)GG(C/A/T)(G/A)(C/G)(C/T/A)(G/A/C) (SEQ ID NO:1), where N is any nucleotide.

[0269] A CTCF-binding motif may also be in an opposite orientation, e.g.,

(G/A/C)(C/T/A)(C/G)(G/A)(C/A/T)GG(G/T)(G/A)GA(C/T/A)(C/G)(A/T/G)CC(G/A/T)N(T/C/G)N (SEQ ID NO:2). In some embodiments, an anchor sequence comprises SEQ ID NO:1 or SEQ ID NO:2 or a sequence at least 75%, at least 80%, at least 90%, at least 95%, at least 96%, at least 97%, at least 98%, at least 99% identical to either SEQ ID NO:1 or SEQ ID NO:2.

[0270] In some embodiments, an anchor sequence comprises a CTCF binding motif, a USF1 binding motif, a YY1 binding motif, a TAF3 binding motif, or a ZNF143 binding motif. In some embodiments, an anchor sequence comprises a nucleating polypeptide binding motif, e.g., a YY1-binding motif: CCGCCATNTT (SEQ ID NO: 3), where N is any nucleotide. A YY1-binding motif may also be in an opposite orientation, e.g., AANATGGCGG (SEQ ID NO: 4), where N is any nucleotide. In some embodiments, an anchor sequence comprises SEQ ID NO:3 or SEQ ID NO:4 or a sequence at least 75%, at least 80%, at least 90%, at least 95%, at least 96%, at least 97%, at least 98%, at least 99% identical to either SEQ ID NO:3 or SEQ ID NO:4.

[0271] In some embodiments, an anchor sequence-mediated conjunction comprises at least a first anchor sequence and a second anchor sequence. For example, in some embodiments, a first anchor sequence and a second anchor sequence may each comprise a common nucleotide sequence, e.g., each comprises a CTCF binding motif. In some embodiments, a first anchor sequence and a second anchor sequence may each comprise a USF1 binding motif. In some embodiments, a first anchor sequence and a second anchor sequence may each comprise a YY1 binding motif. In some embodiments, a first anchor sequence and a second anchor sequence may each comprise a TAF3 binding motif. In some embodiments, a first anchor sequence and a second anchor sequence may each comprise a ZNF143 binding motif.

[0272] In some embodiments, a first anchor sequence and second anchor sequence comprise different sequences, e.g., a first anchor sequence comprises a CTCF binding motif, and a second anchor sequence comprises an anchor sequence other than a CTCF binding motif. In some embodiments, a first anchor sequence comprises a CTCF binding motif, a USF1 binding motif, a YY1 binding motif, a TAF3 binding motif, or a ZNF143 binding motif, and a second anchor sequence comprises a CTCF binding motif, a USF1 binding motif, a YY1 binding motif, a TAF3 binding motif, or a ZNF143 binding motif, wherein the first and second anchor sequences do not both comprise a CTCF binding motif, a USF1 binding motif, a YY1 binding motif, a TAF3 binding motif, or a ZNF143 binding motif. In some embodiments, each anchor sequence comprises a common nucleotide sequence (e.g., a CTCF binding motif, a USF1 binding motif, a YY1 binding motif, a TAF3 binding motif, or a ZNF143 binding motif) and one or more flanking nucleotides on one or both sides of a common nucleotide sequence.

[0273] Two anchor sequences (e.g., each comprising a CTCF binding motif, a USF1 binding motif, a YY1 binding motif, a TAF3 binding motif, or a ZNF143 binding motif) that can form a conjunction may be present in a genome in any orientation, e.g., in the same orientation (tandem) either 5′-3′ (left tandem, or 3′-5′ (right tandem), or convergent orientation, where one anchor sequence is oriented 5′-3′ and the other is oriented 3′-5′.

[0274] Two CTCF-binding motifs (e.g., contiguous or non-contiguous CTCF binding motifs) that can form a conjunction may be present in a genome in any orientation, e.g., in the same orientation (tandem) either 5′-3′ (left tandem, e.g., the two CTCF-binding motifs that comprise SEQ ID NO:1) or 3′-5′ (right tandem, e.g., the two CTCF-binding motifs comprise SEQ ID NO:2), or convergent orientation, where one CTCF-binding motif comprises SEQ ID NO:1 and another other comprises SEQ ID NO:2. CTCFBSDB 2.0: Database For CTCF binding motifs And Genome Organization (on the world wide web at insulatordb.uthsc.edu/) can be used to identify CTCF binding motifs associated with a target gene. In some embodiments, an anchor sequence comprises a CTCF binding motif associated with a target plurality of genes, wherein the target plurality of genes is associated with a disease, disorder and/or condition. In some embodiments, an anchor sequence comprises a CTCF binding motif associated with a target plurality of genes, wherein the genes of the target plurality of genes have related functionalities. In some embodiments, an anchor sequence comprises a CTCF binding motif associated with a target plurality of genes, wherein the target plurality of genes (e.g., two or more, e.g., all, of the plurality) are aberrantly expressed in a cell of a subject.

[0275] In some embodiments, chromatin structure may be modified by substituting, adding, or deleting one or more nucleotides within at least one anchor sequence, e.g., a nucleating polypeptide binding motif. One or more nucleotides may be specifically targeted, e.g., a targeted alteration, for substitution, addition or deletion within an anchor sequence, e.g., a nucleating polypeptide binding motif.

In some embodiments, an anchor sequence-mediated conjunction may be altered by changing an orientation of at least one common nucleotide sequence, e.g., a nucleating polypeptide binding motif. In some embodiments, an anchor sequence comprises a nucleating polypeptide binding motif, e.g., CTCF binding motif, and a targeting moiety introduces an alteration in at least one nucleating polypeptide binding motif, e.g., altering binding affinity for a nucleating polypeptide.
In some embodiments, an anchor sequence-mediated conjunction may be altered by introducing an exogenous anchor sequence. In some embodiments, addition of a non-naturally occurring or exogenous anchor sequence to destabilize or inhibit formation of a naturally occurring anchor sequence-mediated conjunction, e.g., by inducing a non-naturally occurring loop to form, alters (e.g., decreases) transcription of a nucleic acid sequence.

### Other Compositions

[0276] Nucleic Acids and Vectors

[0277] The present disclosure is further directed, in part, to nucleic acids encoding a site-specific disrupting agent or a system described herein. In some embodiments, a site-specific disrupting agent may be provided via a composition comprising a nucleic acid encoding a site-specific disrupting agent, e.g., a targeting moiety and/or effector moiety of the site-specific disrupting agent, wherein the nucleic acid is associated with sufficient other sequences to achieve expression of the site-specific disrupting agent in a system of interest (e.g., in a particular cell, tissue, organism, etc). In some embodiments, system may be provided via a composition comprising a first nucleic acid encoding a first site-specific disrupting agent, e.g., a first targeting moiety and/or a first effector moiety of the first site-specific disrupting agent, and a second nucleic acid encoding a second site-specific disrupting agent, e.g., a second targeting moiety and/or a second effector moiety of the second site-specific disrupting agent wherein the first and/or the second nucleic acid is associated with sufficient other sequences to achieve expression of the site-specific disrupting agents in a system of interest (e.g., in a particular cell, tissue, organism, etc).

[0278] In some particular embodiments, the present disclosure provides compositions of nucleic acids that encode a site-specific disrupting agent or polypeptide or nucleic acid portion thereof (e.g., a targeting moiety and/or effector moiety comprising a polypeptide and/or nucleic acid). In some particular embodiments, the present disclosure provides compositions of nucleic acids that encode a first site-specific disrupting agent and a second site-specific disrupting agent, or polypeptides or nucleic acid portions thereof (e.g., a targeting moiety and/or effector moiety comprising a polypeptide and/or nucleic acid). In some such embodiments, provided nucleic acids may include DNA, RNA, or any other nucleic acid moiety or entity as described herein, and may be prepared by any technology described herein or otherwise available in the art (e.g., synthesis, cloning, amplification, in vitro or in vivo transcription, etc). In some embodiments, provided nucleic acids that encode one or more site-specific disrupting agents, or polypeptides or nucleic acid portions thereof may be operationally associated with one or more replication, integration, and/or expression signals appropriate and/or sufficient to achieve integration, replication, and/or expression of the provided nucleic acid in a system of interest (e.g., in a particular cell, tissue, organism, etc.).

[0279] In some embodiments, a composition for delivering a site-specific disrupting agent or a system described herein comprises a vector, e.g., a viral vector, comprising one or more nucleic acids encoding a site-specific disrupting agent or polypeptide or nucleic acid portion thereof. In some embodiments, a first vector comprises a first nucleic acid encoding a first site-specific disrupting agent, and second vector comprises a second nucleic acid encoding a second site-specific disrupting agent. In some embodiments a single vector comprises a first nucleic acid encoding a first site-specific disrupting agent and a second nucleic acid encoding a second site-specific disrupting agent.

[0280] In some embodiments, a composition for delivering a site-specific disrupting agent or a system described herein is or comprises RNA, e.g., mRNA, comprising one or more nucleic acids encoding one or more components of a site-specific disrupting agent or polypeptide or nucleic acid portion thereof.

[0281] Nucleic acids as described herein or nucleic acids encoding a protein described herein, may be incorporated into a vector. Vectors, including those derived from retroviruses such as lentivirus, are suitable tools to achieve long-term gene transfer since they allow long-term, stable integration of a transgene and its propagation in daughter cells. Examples of vectors include expression vectors, replication vectors, probe generation vectors, and sequencing vectors. An expression vector may be provided to a cell in the form of a viral vector. Viral vector technology is well known in the art and described in a variety of virology and molecular biology manuals. Viruses, which are useful as vectors include, but are not limited to, retroviruses, adenoviruses, adeno-associated viruses, herpes viruses, and lentiviruses. In general, a suitable vector contains an origin of replication functional in at least one organism, a promoter sequence, convenient restriction endonuclease sites, and one or more selectable markers.

[0282] Expression of natural or synthetic nucleic acids is typically achieved by operably linking a nucleic acid encoding the gene of interest to a promoter and incorporating the construct into an expression vector. Vectors can be suitable for replication and integration in eukaryotes. Typical cloning vectors contain transcription and translation terminators, initiation sequences, and promoters useful for expression of the desired nucleic acid sequence.

[0283] Additional promoter elements, e.g., enhancing sequences, may regulate frequency of transcriptional initiation. Typically, these sequences are located in a region 30-110 bp upstream of a transcription start site, although a number of promoters have recently been shown to contain functional elements downstream of transcription start sites as well. Spacing between promoter elements frequently is flexible, so that promoter function is preserved when elements are inverted or moved relative to one another. In a thymidine kinase (tk) promoter, spacing between promoter elements can be increased to 50 bp apart before activity begins to decline. Depending on the promoter, it appears that individual elements can function either cooperatively or independently to activate transcription.

[0284] One example of a suitable promoter is the immediate early cytomegalovirus (CMV) promoter sequence. This promoter sequence is a strong constitutive promoter sequence capable of driving high levels of expression of any polynucleotide sequence operatively linked thereto. In some embodiments of a suitable promoter is Elongation Growth Factor-1α (EF-1α). However, other constitutive promoter sequences may also be used, including, but not limited to the simian virus 40 (SV40) early promoter, mouse mammary tumor virus (MMTV), human immunodeficiency virus (HIV) long terminal repeat (LTR) promoter, MoMuLV promoter, an avian leukemia virus promoter, an Epstein-Barr virus immediate early promoter, a Rous sarcoma virus promoter, as well as human gene promoters such as, but not limited to, an actin promoter, a myosin promoter, a hemoglobin promoter, and a creatine kinase promoter. The present disclosure should not be interpreted to be limited to use of any particular promoter or category of promoters (e.g., constitutive promoters). For example, in some embodiments, inducible promoters are contemplated as part of the present disclosure. In some embodiments, use of an inducible promoter provides a molecular switch capable of turning on expression of a polynucleotide sequence to which it is operatively linked, when such expression is desired. In some embodiments, use of an inducible promoter provides a molecular switch capable of turning off expression when expression is not desired. Examples of inducible promoters include, but are not limited to a metallothionine promoter, a glucocorticoid promoter, a progesterone promoter, and a tetracycline promoter.

[0285] In some embodiments, an expression vector to be introduced can also contain either a selectable marker gene or a reporter gene or both to facilitate identification and selection of expressing cells from the population of cells sought to be transfected or infected through viral vectors. In some aspects, a selectable marker may be carried on a separate piece of DNA and used in a co-transfection procedure. Both selectable markers and reporter genes may be flanked with appropriate transcriptional control sequences to enable expression in the host cells. Useful selectable markers may include, for example, antibiotic-resistance genes, such as neo, etc.

[0286] In some embodiments, reporter genes may be used for identifying potentially transfected cells and/or for evaluating the functionality of transcriptional control sequences. In general, a reporter gene is a gene that is not present in or expressed by a recipient source (of a reporter gene) and that encodes a polypeptide whose expression is manifested by some easily detectable property, e.g., enzymatic activity or visualizable fluorescence. Expression of a reporter gene is assayed at a suitable time after the DNA has been introduced into the recipient cells. Suitable reporter genes may include genes encoding luciferase, beta-galactosidase, chloramphenicol acetyl transferase, secreted alkaline phosphatase, or the green fluorescent protein gene (e.g., Ui-Tei et al., 2000 FEBS Letters 479: 79-82). Suitable expression systems are well known and may be prepared using known techniques or obtained commercially. In general, a construct with a minimal 5′ flanking region that shows highest level of expression of reporter gene is identified as a promoter. Such promoter regions may be linked to a reporter gene and used to evaluate agents for ability to modulate promoter-driven transcription.

[0287] Cells

[0288] The present disclosure is further directed, in part, to cells comprising a site-specific disrupting agent or a system described herein. Any cell, e.g., cell line, e.g., a cell line suitable for expression of a recombinant polypeptide, known to one of skill in the art is suitable to comprise a site-specific disrupting agent described herein. In some embodiments, a cell, e.g., cell line, may be used to express a site-specific disrupting agent, a system comprising one or more site-specific agents, or nucleic acid or polypeptide portion thereof. In some embodiments, a cell, e.g., cell line, may be used to express or amplify a nucleic acid, e.g., a vector, encoding a site-specific disrupting agent. In some embodiments, a cell, e.g., cell line, may be used to express or amplify one or more nucleic acids, e.g., a vector, encoding a first site-specific disrupting agent and a vector encoding a second site specific disrupting agent. In some embodiments, a cell comprises a nucleic acid encoding a site-specific disrupting agent described herein. In some embodiments, a cell comprises a first nucleic acid encoding a first site-specific disrupting agent and a second nucleic acid encoding a second site-specific disrupting agent described herein.

[0289] In some embodiments, a cell comprises a nucleic acid encoding a site-specific disrupting agent or nucleic acid or polypeptide portion thereof, and the nucleic acid is integrated into the genomic DNA of the cell. In some embodiments, a cell comprises a nucleic acid encoding a site-specific disrupting agent or nucleic acid or polypeptide portion thereof, and the nucleic acid is disposed on a vector. In some embodiments, a cell comprises a first nucleic acid encoding a first site-specific disrupting agent and a second nucleic acid encoding a second site-specific disrupting agent or nucleic acid or polypeptide portion thereof, and the first and the second nucleic acid are integrated into the genomic DNA of the cell. In some embodiments, a cell comprises a first nucleic acid encoding a first site-specific disrupting agent and a second nucleic acid encoding a second site-specific disrupting agent or nucleic acid or polypeptide portion thereof, and the first and the second nucleic acid are disposed on a vector.

[0290] Examples of cells that may comprise and/or express a site-specific disrupting agent or a system herein include, but are not limited to, hepatocytes, stellate cells, Kupffer cells, neuronal cells, endothelial cells, alveolar cells, epithelial cells, myocytes, synovial layer, chondrocytes, immune cells, and lymphocytes.

[0291] The present disclosure is further directed, in part, to a cell made by a method or process described herein. In some embodiments, the disclosure provides a cell produced by, providing a site-specific disrupting agent described herein, providing the cell, and contacting the cell with the site-specific disrupting agent (or a nucleic acid encoding the site-specific disrupting agent, or a composition comprising said site-specific disrupting agent or nucleic acid). In some embodiments, the disclosure provides a cell produced by, providing system described herein, providing the cell, and contacting the cell with the system (or a first nucleic acid encoding the first site-specific disrupting agent and second nucleic acid encoding the second site-specific disrupting agent, or a composition comprising said system or nucleic acids). Without wishing to be bound by theory, a cell contacted with a site-specific disrupting agent or a system described herein may exhibit: a decrease in expression of a target plurality of genes; a modification of epigenetic markers associated with the target plurality of genes, a transcription control element operably linked to the target plurality of genes, or an anchor sequence proximal to the target plurality of genes or associated with an anchor sequence-mediated conjunction comprising the target plurality of genes; a genetic modification of a gene of the target plurality of genes, a transcription control element operably linked to the target plurality of genes, or an anchor sequence proximal to the target plurality of genes or associated with an anchor sequence-mediated conjunction comprising the target plurality of genes; and/or a decrease (e.g., the absence of) in the level of a genomic complex, e.g., ASMC, comprising a target plurality of genes, compared to a similar cell that has not been contacted by the site-specific disrupting agent. In some embodiments, a cell exhibiting said decrease in expression of a target plurality of genes, modification of epigenetic markers, and/or genetic modification does not comprise the site-specific disrupting agent. The decrease in expression of a target plurality of genes, modification of epigenetic markers, and/or genetic modification may persist, e.g., for at least 1, 2, 3, 4, 5, 6, 7, 8, 9, 10, 11, 12, 13, 14, 15, 16, 17, 18, 19, 20, 21, 22, 23, or 24 hours, or at least 1, 2, 3, 4, 5, 6, 7, 10, or 14 days, or at least 1, 2, 3, 4, or 5 weeks, or at least 1, 2, 3, 4, 5, 6, 7, 8, 9, 10, 11, or 12 months, or at least 1, 2, 3, 4, or 5 years (e.g., indefinitely) after contact with the site-specific disrupting agent. In some embodiments, a cell previously contacted by a site-specific disrupting agent retains the decrease in expression of a target plurality of genes, modification of epigenetic markers, and/or genetic modification after the site-specific disrupting agent is no longer present in the cell, e.g., for at least 1, 2, 3, 4, 5, 6, 7, 8, 9, 10, 11, 12, 13, 14, 15, 16, 17, 18, 19, 20, 21, 22, 23, or 24 hours, or at least 1, 2, 3, 4, 5, 6, 7, 10, or 14 days, or at least 1, 2, 3, 4, or 5 weeks, or at least 1, 2, 3, 4, 5, 6, 7, 8, 9, 10, 11, or 12 months, or at least 1, 2, 3, 4, or 5 years (e.g., indefinitely) after the site-specific disrupting agent is no longer present in the cell. In some embodiments, the cell is a mammalian, e.g., human, cell. In some embodiments, the cell is a somatic cell and/or a primary cell.

[0292] Kits

[0293] The present disclosure further directed, in part, to a kit comprising a site-specific disrupting agent, a system, nucleic acid encoding a site-specific disrupting agent, or a first nucleic acid encoding the first site-specific disrupting agent and a second nucleic acid encoding the second site-specific disrupting agent described herein. In some embodiments, a kit comprises a site-specific disrupting agent, a system, or nucleic acid encoding the same and instructions for the use of said site-specific disrupting agent or the system. In some embodiments, a kit comprises a nucleic acid encoding the site-specific disrupting agent or a component thereof (e.g., a polypeptide or nucleic acid portion of the site-specific disrupting agent) and instructions for the use of said nucleic acid and/or said site-specific disrupting agent. In some embodiments, a kit comprises a cell comprising a nucleic acid encoding the site-specific disrupting agent or a component thereof (e.g., a polypeptide or nucleic acid portion of the site-specific disrupting agent) and instructions for the use of said cell, nucleic acid, and/or said site-specific disrupting agent. In some embodiments, a kit comprises or a first nucleic acid encoding the first site-specific disrupting agent and a second nucleic acid encoding the second site-specific disrupting agent or a component thereof (e.g., a polypeptide or nucleic acid portion of the first and the second site-specific disrupting agent) and instructions for the use of said nucleic acids and/or said system. In some embodiments, a kit comprises a cell comprising a nucleic acid encoding or a first nucleic acid encoding the first site-specific disrupting agent and a second nucleic acid encoding the second site-specific disrupting agent or a component thereof (e.g., a polypeptide or nucleic acid portion of the first and the second site-specific disrupting agent) and instructions for the use of said cell, nucleic acid, and/or said system.

[0294] In some embodiments, a kit comprises a unit dosage of a site-specific disrupting agent, or a unit dosage of a nucleic acid, e.g., a vector, encoding a site-specific disrupting agent described herein. In some embodiments, a kit comprises a unit dosage of a system, or a unit dosage of a first and a second nucleic acid, e.g., a vector, encoding a first site-specific disrupting agent and a second site-specific disrupting agent described herein.

### Methods of Making a Site-Specific Disrupting Agent

[0295] In some embodiments, a site-specific disrupting agent or a system comprises one or more proteins and may thus be produced by methods of making proteins. As will be appreciated by one of skill, methods of making proteins or polypeptides (which may be included in modulating agents as described herein) are routine in the art. See, in general, Smales & James (Eds.), Therapeutic Proteins: Methods and Protocols (Methods in Molecular Biology), Humana Press (2005); and Crommelin, Sindelar & Meibohm (Eds.), Pharmaceutical Biotechnology: Fundamentals and Applications, Springer (2013).

[0296] A protein or polypeptide of compositions of the present disclosure can be biochemically synthesized by employing standard solid phase techniques. Such methods include exclusive solid phase synthesis, partial solid phase synthesis methods, fragment condensation, classical solution synthesis. These methods can be used when a peptide is relatively short (e.g., 10 kDa) and/or when it cannot be produced by recombinant techniques (i.e., not encoded by a nucleic acid sequence) and therefore involves different chemistry.

[0297] Solid phase synthesis procedures are well known in the art and further described by John Morrow Stewart and Janis Dillaha Young, Solid Phase Peptide Syntheses, 2nd Ed., Pierce Chemical Company, 1984; and Coin, I., et al., Nature Protocols, 2:3247-3256, 2007.

[0298] For longer peptides, recombinant methods may be used. Methods of making a recombinant therapeutic polypeptide are routine in the art. See, in general, Smales & James (Eds.), Therapeutic Proteins: Methods and Protocols (Methods in Molecular Biology), Humana Press (2005); and Crommelin, Sindelar & Meibohm (Eds.), Pharmaceutical Biotechnology: Fundamentals and Applications, Springer (2013).

[0299] Exemplary methods for producing a therapeutic pharmaceutical protein or polypeptide involve expression in mammalian cells, although recombinant proteins can also be produced using insect cells, yeast, bacteria, or other cells under control of appropriate promoters. Mammalian expression vectors may comprise non-transcribed elements such as an origin of replication, a suitable promoter, and other 5′ or 3′ flanking non-transcribed sequences, and 5′ or 3′ non-translated sequences such as necessary ribosome binding sites, a polyadenylation site, splice donor and acceptor sites, and termination sequences. DNA sequences derived from the SV40 viral genome, for example, SV40 origin, early promoter, splice, and polyadenylation sites may be used to provide other genetic elements required for expression of a heterologous DNA sequence. Appropriate cloning and expression vectors for use with bacterial, fungal, yeast, and mammalian cellular hosts are described in Green & Sambrook, Molecular Cloning: A Laboratory Manual (Fourth Edition), Cold Spring Harbor Laboratory Press (2012).

In cases where large amounts of the protein or polypeptide are desired, it can be generated using techniques such as described by Brian Bray, Nature Reviews Drug Discovery, 2:587-593, 2003; and Weissbach & Weissbach, 1988, Methods for Plant Molecular Biology, Academic Press, NY, Section VIII, pp 421-463.

[0300] Various mammalian cell culture systems can be employed to express and manufacture recombinant protein. Examples of mammalian expression systems include CHO cells, COS cells, HeLA and BHK cell lines. Processes of host cell culture for production of protein therapeutics are described in Zhou and Kantardjieff (Eds.), Mammalian Cell Cultures for Biologics Manufacturing (Advances in Biochemical Engineering/Biotechnology), Springer (2014). Compositions described herein may include a vector, such as a viral vector, e.g., a lentiviral vector, encoding a recombinant protein. In some embodiments, a vector, e.g., a viral vector, may comprise a nucleic acid encoding a recombinant protein. Purification of protein therapeutics is described in Franks, Protein Biotechnology: Isolation, Characterization, and Stabilization, Humana Press (2013); and in Cutler, Protein Purification Protocols (Methods in Molecular Biology), Humana Press (2010). Formulation of protein therapeutics is described in Meyer (Ed.), Therapeutic Protein Drug Products: Practical Approaches to formulation in the Laboratory, Manufacturing, and the Clinic, Woodhead Publishing Series (2012). Proteins comprise one or more amino acids. Amino acids include any compound and/or substance that can be incorporated into a polypeptide chain, e.g., through formation of one or more peptide bonds. In some embodiments, an amino acid has the general structure H₂N—C(H)(R)—COOH. In some embodiments, an amino acid is a naturally-occurring amino acid. In some embodiments, an amino acid is a non-natural amino acid; in some embodiments, an amino acid is a D-amino acid; in some embodiments, an amino acid is an L-amino acid. “Standard amino acid” refers to any of the twenty standard L-amino acids commonly found in naturally occurring peptides. “Nonstandard amino acid” refers to any amino acid, other than the standard amino acids, regardless of whether it is prepared synthetically or obtained from a natural source. In some embodiments, an amino acid, including a carboxy- and/or amino-terminal amino acid in a polypeptide, can contain a structural modification as compared with the general structure above. For example, in some embodiments, an amino acid may be modified by methylation, amidation, acetylation, pegylation, glycosylation, phosphorylation, and/or substitution (e.g., of the amino group, the carboxylic acid group, one or more protons, and/or the hydroxyl group) as compared with the general structure. In some embodiments, such modification may, for example, alter the circulating half-life of a polypeptide containing the modified amino acid as compared with one containing an otherwise identical unmodified amino acid. In some embodiments, such modification does not significantly alter a relevant activity of a polypeptide containing the modified amino acid, as compared with one containing an otherwise identical unmodified amino acid. As will be clear from context, in some embodiments, the term “amino acid” may be used to refer to a free amino acid; in some embodiments it may be used to refer to an amino acid residue of a polypeptide.

### Pharmaceutical Compositions, Formulation, Delivery, and Administration

[0301] The present disclosure is further directed, in part, to pharmaceutical compositions comprising a site-specific disrupting agent described herein, and to pharmaceutical compositions comprising nucleic acids encoding a site-specific disrupting agent or a system described herein.

[0302] As used herein, the term “pharmaceutical composition” refers to an active agent (e.g., a site-specific disrupting agent or a system, or nucleic acid encoding the same), formulated together with one or more pharmaceutically acceptable carriers (e.g., pharmaceutically acceptable carriers known to those of skill in the art). In some embodiments, active agent is present in unit dose amount appropriate for administration in a therapeutic regimen that shows a statistically significant probability of achieving a predetermined therapeutic effect when administered to a relevant population. In some embodiments, a pharmaceutical composition comprises a site-specific disrupting agent or a system of the present disclosure.

[0303] In some embodiments, pharmaceutical compositions may be specially formulated for administration in solid or liquid form, including those adapted for the following: oral administration, for example, drenches (aqueous or non-aqueous solutions or suspensions), tablets, e.g., those targeted for buccal, sublingual, and systemic absorption, boluses, powders, granules, pastes for application to the tongue; parenteral administration, for example, by subcutaneous, intramuscular, intravenous or epidural injection as, for example, a sterile solution or suspension, or sustained-release formulation; topical application, for example, as a cream, ointment, or a controlled-release patch or spray applied to the skin, lungs, or oral cavity; intravaginally or intrarectally, for example, as a pessary, cream, or foam; sublingually; ocularly; trans-dermally; or nasally, pulmonary, and/or to other mucosal surfaces, for example, as aerosols, aqueous solutions, or suspensions. In some embodiments, the composition may be lyophilized or spray dried. In some embodiments, the composition may be formulated for pulmonary administration and/or intravenous administration.

[0304] As used herein, the term “pharmaceutically acceptable” refers to those compounds, materials, compositions, and/or dosage forms which are, within the scope of sound medical judgment, suitable for use in contact with the tissues of human beings and animals without excessive toxicity, irritation, allergic response, or other problem or complication, commensurate with a reasonable benefit/risk ratio.

[0305] As used herein, the term “pharmaceutically acceptable carrier” means a pharmaceutically acceptable material, composition, or vehicle, such as a liquid or solid filler, diluent, excipient, or solvent encapsulating material, involved in carrying or transporting the subject compound from one organ, or portion of the body, to another organ, or portion of the body. Each carrier must be “acceptable” in the sense of being compatible with the other ingredients of the formulation and not injurious to the patient. In some embodiments, for example, materials which can serve as pharmaceutically-acceptable carriers include: sugars, such as lactose, glucose and sucrose; starches, such as corn starch and potato starch; cellulose, and its derivatives, such as sodium carboxymethyl cellulose, ethyl cellulose and cellulose acetate; powdered tragacanth; malt; gelatin; talc; excipients, such as cocoa butter and suppository waxes; oils, such as peanut oil, cottonseed oil, safflower oil, sesame oil, olive oil, corn oil and soybean oil; glycols, such as propylene glycol; polyols, such as glycerin, sorbitol, mannitol and polyethylene glycol; esters, such as ethyl oleate and ethyl laurate; agar; buffering agents, such as magnesium hydroxide and aluminum hydroxide; alginic acid; pyrogen-free water; isotonic saline; Ringer's solution; ethyl alcohol; pH buffered solutions; polyesters, polycarbonates and/or polyanhydrides; and other non-toxic compatible substances employed in pharmaceutical formulations.

[0306] As used herein, the term “pharmaceutically acceptable salt”, refers to salts of such compounds that are appropriate for use in pharmaceutical contexts, i.e., salts which are, within the scope of sound medical judgment, suitable for use in contact with the tissues of humans and lower animals without undue toxicity, irritation, allergic response, and the like, and are commensurate with a reasonable benefit/risk ratio. Pharmaceutically acceptable salts are well known in the art. For example, S. M. Berge, et al. describes pharmaceutically acceptable salts in detail in J. Pharmaceutical Sciences, 66: 1-19 (1977). In some embodiments, pharmaceutically acceptable salts include, but are not limited to, nontoxic acid addition salts, which are salts of an amino group formed with inorganic acids such as hydrochloric acid, hydrobromic acid, phosphoric acid, sulfuric acid and perchloric acid or with organic acids such as acetic acid, maleic acid, tartaric acid, citric acid, succinic acid, or malonic acid or by using other methods used in the art such as ion exchange. In some embodiments, pharmaceutically acceptable salts include, but are not limited to, adipate, alginate, ascorbate, aspartate, benzenesulfonate, benzoate, bisulfate, borate, butyrate, camphorate, camphorsulfonate, citrate, cyclopentanepropionate, digluconate, dodecylsulfate, ethanesulfonate, formate, fumarate, glucoheptonate, glycerophosphate, gluconate, hemisulfate, heptanoate, hexanoate, hydroiodide, 2-hydroxy-ethanesulfonate, lactobionate, lactate, laurate, lauryl sulfate, malate, maleate, malonate, methanesulfonate, 2-naphthalenesulfonate, nicotinate, nitrate, oleate, oxalate, palmitate, pamoate, pectinate, persulfate, 3-phenylpropionate, phosphate, picrate, pivalate, propionate, stearate, succinate, sulfate, tartrate, thiocyanate, p-toluenesulfonate, undecanoate, valerate salts, and the like. Representative alkali or alkaline earth metal salts include sodium, lithium, potassium, calcium, magnesium, and the like. In some embodiments, pharmaceutically acceptable salts include, when appropriate, nontoxic ammonium, quaternary ammonium, and amine cations formed using counterions such as halide, hydroxide, carboxylate, sulfate, phosphate, nitrate, alkyl having from 1 to 6 carbon atoms, sulfonate, and aryl sulfonate.

[0307] In various embodiments, the present disclosure provides pharmaceutical compositions described herein with a pharmaceutically acceptable excipient. Pharmaceutically acceptable excipient includes an excipient that is useful in preparing a pharmaceutical composition that is generally safe, non-toxic, and desirable, and includes excipients that are acceptable for veterinary use as well as for human pharmaceutical use. Such excipients may be solid, liquid, semisolid, or, in the case of an aerosol composition, gaseous.

[0308] Pharmaceutical preparations may be made following conventional techniques of pharmacy involving milling, mixing, granulation, and compressing, when necessary, for tablet forms; or milling, mixing, and filling for hard gelatin capsule forms. When a liquid carrier is used, a preparation can be in the form of a syrup, elixir, emulsion or an aqueous or non-aqueous solution or suspension. Such a liquid formulation may be administered directly per os.

[0309] In some embodiments, pharmaceutical compositions may be formulated for delivery to a cell and/or to a subject via any route of administration. Modes of administration to a subject may include injection, infusion, inhalation, intranasal, intraocular, topical delivery, inter-cannular delivery, or ingestion. Injection includes, without limitation, intravenous, intramuscular, intra-arterial, intrathecal, intraventricular, intracapsular, intra-orbital, intracardiac, intradermal, intraperitoneal, transtracheal, subcutaneous, subcuticular, intraarticular, bronchial, sub-capsular, subarachnoid, intraspinal, intra-cerebrospinal, and intra-sternal injection and infusion. In some embodiments, administration includes aerosol inhalation, e.g., with nebulization. In some embodiments, administration is systemic (e.g., oral, rectal, nasal, sublingual, buccal, or parenteral), enteral (e.g., system-wide effect, but delivered through the gastrointestinal tract), or local (e.g., local application on the skin, intravitreal injection). In some embodiments, one or more compositions is administered systemically. In some embodiments, administration is non-parenteral and a therapeutic is a parenteral therapeutic. In some embodiments, administration may be bronchial (e.g., by bronchial instillation), buccal, dermal (which may be or comprise, for example, one or more of topical to the dermis, intradermal, inter-dermal, transdermal, etc.), enteral, intra-arterial, intradermal, intragastric, intramedullary, intramuscular, intranasal, intraperitoneal, intrathecal, intravenous, intraventricular, within a specific organ (e. g. intrahepatic), mucosal, nasal, oral, rectal, subcutaneous, sublingual, topical, tracheal (e.g., by intratracheal instillation), vaginal, vitreal, etc. In some embodiments, administration may be a single dose. In some embodiments, administration may involve dosing that is intermittent (e.g., a plurality of doses separated in time) and/or periodic (e.g., individual doses separated by a common period of time) dosing. In some embodiments, administration may involve continuous dosing (e.g., perfusion) for at least a selected period of time. In some embodiments, six, eight, ten, 12, 15 or 20 or more administrations may be given to the subject during one treatment or over a period of time as a treatment regimen. In some embodiments, administrations may be given as needed, e.g., for as long as symptoms associated with the disease, disorder or condition persist. In some embodiments, repeated administrations may be indicated for the remainder of the subject's life. Treatment periods may vary and could be, e.g., one day, two days, three days, one week, two weeks, one month, two months, three months, six months, a year, or longer.

[0310] In some embodiments, administration is provided using a respiratory delivery device, e.g., nebulizer, e.g., metered-dose inhaler, e.g., dry powder inhaler. Some of the commercially available dry powder inhalers include Spinhaler (Fisons Pharmaceuticals, Rochester, NY) and Rotahaler (GSK, RTP, NC). In some embodiments, the nebulizer may include a jet nebulizer, an ultrasonic nebulizer, and/or a vibrating mesh nebulizer.

### Dosage

[0311] Pharmaceutical compositions according to the present disclosure may be delivered in a therapeutically effective amount. A precise therapeutically effective amount is an amount of a composition that will yield the most effective results in terms of efficacy of treatment in a given subject. This amount will vary depending upon a variety of factors, including but not limited to characteristics of a therapeutic compound (including activity, pharmacokinetics, pharmacodynamics, and bioavailability), physiological condition of a subject (including age, sex, disease type and stage, general physical condition, responsiveness to a given dosage, and type of medication), nature of a pharmaceutically acceptable carrier or carriers in a formulation, and/or route of administration.

[0312] In some aspects, the present disclosure provides methods of delivering a therapeutic comprising administering a composition as described herein to a subject, wherein a genomic complex modulating agent is a therapeutic and/or wherein delivery of a therapeutic causes changes in gene expression relative to gene expression in absence of a therapeutic.

[0313] Methods as provided in various embodiments herein may be utilized in any some aspects delineated herein. In some embodiments, one or more compositions is/are targeted to specific cells, or one or more specific tissues.

[0314] For example, in some embodiments one or more compositions is/are targeted to epithelial, connective, muscular, and/or nervous tissue or cells. In some embodiments a composition is targeted to a cell or tissue of a particular organ system, e.g., respiratory system (pharynx, larynx, trachea, bronchi, lungs, diaphragm), cardiovascular system (heart, vasculature); digestive system (esophagus, stomach, liver, gallbladder, pancreas, intestines, colon, rectum and anus); endocrine system (hypothalamus, pituitary gland, pineal body or pineal gland, thyroid, parathyroids, adrenal glands); excretory system (kidneys, ureters, bladder); lymphatic system (lymph, lymph nodes, lymph vessels, tonsils, adenoids, thymus, spleen); integumentary system (skin, hair, nails); muscular system (e.g., skeletal muscle); nervous system (brain, spinal cord, nerves); reproductive system (ovaries, uterus, mammary glands, testes, vas deferens, seminal vesicles, prostate); skeletal system (bone, cartilage); and/or combinations thereof. In some embodiments, a composition is targeted to a cell, e.g., endothelial, alveolar, epithelial, hepatocytes, stellate cells, Kupffer cells, synovial layer, chondrocytes, fibroblast cells, ductal epithelial cells, epithelial enterocytes, goblet cells, basal cells, and/or immune cells. In some embodiments, a composition is targeted to a cell of an organ, e.g., nasal cells, lung cells, ileum cells, cardiac cells, optic cells, liver cells, bladder cells, pancreatic cells, kidney cells, neural cells, prostrate cells, testis cells, In some embodiments, a composition of the present disclosure crosses a blood-brain-barrier, a placental membrane, or a blood-testis barrier. In some embodiments, a composition is targeted to a cell expressing an ACE-2 receptor.

[0315] In some embodiments, a pharmaceutical composition as provided herein is administered systemically.

[0316] In some embodiments, administration is non-parenteral and a therapeutic is a parenteral therapeutic.

[0317] In some embodiments, a pharmaceutical composition of the present disclosure has improved PK/PD, e.g., increased pharmacokinetics or pharmacodynamics, such as improved targeting, absorption, or transport (e.g., at least 5%, 10%, 15%, 20%, 30%, 40%, 50%, 60%, 75%, 80%, 90% improved or more) as compared to a active agent alone. In some embodiments, a pharmaceutical composition has reduced undesirable effects, such as reduced diffusion to a nontarget location, off-target activity, or toxic metabolism, as compared to a therapeutic alone (e.g., at least 5%, 10%, 15%, 20%, 30%, 40%, 50%, 60%, 75%, 80%, 90% or more reduced, as compared to an active agent alone). In some embodiments, a composition increases efficacy and/or decreases toxicity of a therapeutic (e.g., at least 5%, 10%, 15%, 20%, 30%, 40%, 50%, 60%, 75%, 80%, 90% or more) as compared to an active agent alone.

[0318] Pharmaceutical compositions described herein may be formulated for example including a carrier, such as a pharmaceutical carrier and/or a polymeric carrier, e.g., a liposome or vesicle, and delivered by known methods to a subject in need thereof (e.g., a human or non-human agricultural or domestic animal, e.g., cattle, dog, cat, horse, poultry). Such methods include transfection (e.g., lipid-mediated, cationic polymers, calcium phosphate); electroporation or other methods of membrane disruption (e.g., nucleofection) and viral delivery (e.g., lentivirus, retrovirus, adenovirus, AAV). Methods of delivery are also described, e.g., in Gori et al., Delivery and Specificity of CRISPR/Cas9 Genome Editing Technologies for Human Gene Therapy. Human Gene Therapy. July 2015, 26(7): 443-451. doi:10.1089/hum.2015.074; and Zuris et al. Cationic lipid-mediated delivery of proteins enables efficient protein-based genome editing in vitro and in vivo. Nat Biotechnol. 2014 Oct. 30; 33(1):73-80.

[0319] Lipid Nanoparticles

[0320] Site-specific disrupting agents as described herein can be delivered using any biological delivery system/formulation including a particle, for example, a nanoparticle delivery system. Nanoparticles include particles with a dimension (e.g. diameter) between about 1 and about 1000 nanometers, between about 1 and about 500 nanometers in size, between about 1 and about 100 nm, between about 30 nm and about 200 nm, between about 50 nm and about 300 nm, between about 75 nm and about 200 nm, between about 100 nm and about 200 nm, and any range therebetween. A nanoparticle has a composite structure of nanoscale dimensions. In some embodiments, nanoparticles are typically spherical although different morphologies are possible depending on the nanoparticle composition. The portion of the nanoparticle contacting an environment external to the nanoparticle is generally identified as the surface of the nanoparticle. In some embodiments, nanoparticles have a greatest dimension ranging between 25 nm and 200 nm. Nanoparticles as described herein comprise delivery systems that may be provided in any form, including but not limited to solid, semi-solid, emulsion, or colloidal nanoparticles. A nanoparticle delivery system may include but not limited to lipid-based systems, liposomes, micelles, microvesicles, exosomes, or gene gun. In one embodiment, the nanoparticle is a lipid nanoparticle (LNP). In some embodiments, the LNP is a particle that comprises a plurality of lipid molecules physically associated with each other by intermolecular forces. In some embodiments, an LNP may comprise multiple components, e.g., 3-4 components. In one embodiment, the site-specific disrupting agent or a pharmaceutical composition comprising said site-specific disrupting agent (or a nucleic acid encoding the same, or pharmaceutical composition comprising a nucleic acid encoding said site specific disrupting agent) is encapsulated in an LNP. In one embodiment, the system or a pharmaceutical composition comprising said system (or a nucleic acid encoding the same, or pharmaceutical composition comprising nucleic acid encoding the said system) is encapsulated in an LNP. In some embodiments, the nucleic acid encoding the first site-specific disrupting agent and the nucleic acid encoding the second site-specific disrupting agent are present in same LNP. In some embodiments, the nucleic acid encoding the first site-specific disrupting agent and the nucleic acid encoding the second site-specific disrupting agent are present in different LNPs. Preparation of LNPs and the modulating agent encapsulation may be used/and or adapted from Rosin et al, Molecular Therapy, vol. 19, no. 12, pages 1286-2200, December 2011). In some embodiments, lipid nanoparticle compositions disclosed herein are useful for expression of protein encoded by mRNA. In some embodiments, nucleic acids, when present in the lipid nanoparticles, are resistant in aqueous solution to degradation with a nuclease.

[0321] In some embodiments, the LNP formulations may include a CCD lipid, a neutral lipid, and/or a helper lipid. In some embodiments, the LNP formulation comprises an ionizable lipid. In some embodiments, an ionizable lipid may be a cationic lipid, an ionizable cationic lipid, or an amine-containing lipid that can be readily protonated. In some embodiments, the lipid is a cationic lipid that can exist in a positively charged or neutral form depending on pH. In some embodiments, the cationic lipid is a lipid capable of being positively charged, e.g., under physiological conditions. In some embodiments, the lipid particle comprises a cationic lipid in formulation with one or more of neutral lipids, ionizable amine-containing lipids, biodegradable alkyn lipids, steroids, phospholipids including polyunsaturated lipids, structural lipids (e.g., sterols), PEG, cholesterol and polymer conjugated lipids. In some embodiments, LNP formulation (e.g., MC3 and/or SSOP) includes cholesterol, PEG, and/or a helper lipid. The LNPs may be, e.g., microspheres (including uni-lamellar and multi-lamellar vesicles, lamellar phase lipid bilayers that, in some embodiments, are substantially spherical. In some embodiments, the LNP can comprise an aqueous core, e.g., comprising a nucleic acid encoding a site-specific disrupting agent or a system as disclosed herein. In some embodiments of the present disclosure, the cargo for the LNP formulation includes at least one guide RNA. In some embodiments, the cargo, e.g., a nucleic acid encoding a site-specific disrupting agent, or a system as disclosed herein, may be adsorbed to the surface of an LNP, e.g., an LNP comprising a cationic lipid. In some embodiments, the cargo, e.g., a nucleic acid encoding a site-specific disrupting agent, or a system as disclosed herein may be associated with the LNP. In some embodiments, the cargo, e.g., a nucleic acid encoding a site-specific disrupting agent, or a system as disclosed herein, may be encapsulated, e.g., fully encapsulated and/or partially encapsulated in an LNP.

[0322] In some embodiments, an LNP comprising a cargo may be administered for systemic delivery, e.g., delivery of a therapeutically effective dose of cargo that can result in a broad exposure of an active agent within an organism. Systemic delivery of lipid nanoparticles can be for example, intravenous, pulmonary, bronchial, intraarterial, subcutaneous, and intraperitoneal delivery. In some embodiments, systemic delivery of lipid nanoparticles is by intravenous delivery. In some embodiments, an LNP comprising a cargo may be administered for local delivery, e.g., delivery of an active agent directly to a target site within an organism. In some embodiments, an LNP may be locally delivered into a disease site, e.g., a tumor, other target site, e.g., a site of inflammation, or to a target organ, e.g., the liver, lung, stomach, colon, pancreas, uterus, breast, lymph nodes, and the like. In some embodiments, an LNP as disclosed herein may be locally delivered to a specific cell, e.g., hepatocytes, stellate cells, Kupffer cells, endothelial, alveolar, and/or epithelial cells. In some embodiments, an LNP as disclosed herein may be locally delivered to a specific tumor site, e.g., subcutaneous, orthotopic.

[0323] The LNPs may be formulated as a dispersed phase in an emulsion, micelles, or an internal phase in a suspension. In some embodiments, the LNPs are biodegradable. In some embodiments, the LNPs do not accumulate to cytotoxic levels or cause toxicity in vivo at a therapeutically effective dose. In some embodiments, the LNPs do not accumulate to cytotoxic levels or cause toxicity in vivo after repeat administrations at a therapeutically effective dose. In some embodiments, the LNPs do not cause an innate immune response that leads to a substantially adverse effect at a therapeutically effective dose.

[0324] In some embodiments, the LNP used, comprises the formula (6Z,9Z,28Z,31Z)-heptatriacont-6,9,28,31-tetraene-19-yl 4-(dimethylamino) butanoate or ssPalmO-phenyl-P4C2 (ssPalmO-Phe, SS-OP). In some embodiments, the LNP formulation comprises the formula, (6Z,9Z,28Z,31Z)-heptatriacont-6,9,28,31-tetraene-19-yl 4-(dimethylamino)butanoate (MC3), 1,2-dioleoyl-sn-glycero-3-phosphocholine (DOPC), Cholesterol, 1,2-dimyristoyl-rac-glycero-3-methoxypolyethylene glycol-2000 (PEG2k-DMG), e.g., MC3 LNP or ssPalmO-phenyl-P4C2 (ssPalmO-Phe, SS-OP), 1,2-dioleoyl-sn-glycero-3-phosphocholine (DOPC), Cholesterol, 1,2-dimyristoyl-rac-glycero-3-methoxypolyethylene glycol-2000 (PEG2k-DMG), e.g., SSOP-LNP.

[0325] Liposomes are spherical vesicle structures composed of a uni- or multi-lamellar lipid bilayer surrounding internal aqueous compartments and a relatively impermeable outer lipophilic phospholipid bilayer. Liposomes may be anionic, neutral or cationic. Liposomes are biocompatible, nontoxic, can deliver both hydrophilic and lipophilic drug molecules, protect their cargo from degradation by plasma enzymes, and transport their load across biological membranes and the blood brain barrier (BBB) (see, e.g., Spuch and Navarro, Journal of Drug Delivery, vol. 2011, Article ID 469679, 12 pages, 2011. doi:10.1155/2011/469679 for review).

[0326] Vesicles can be made from several different types of lipids; however, phospholipids are most commonly used to generate liposomes as drug carriers. Vesicles may comprise without limitation DOTMA, DOTAP, DOTIM, DDAB, alone or together with cholesterol to yield DOTMA and cholesterol, DOTAP and cholesterol, DOTIM and cholesterol, and DDAB and cholesterol. Methods for preparation of multilamellar vesicle lipids are known in the art (see for example U.S. Pat. No. 6,693,086, the teachings of which relating to multilamellar vesicle lipid preparation are incorporated herein by reference). Although vesicle formation can be spontaneous when a lipid film is mixed with an aqueous solution, it can also be expedited by applying force in the form of shaking by using a homogenizer, sonicator, or an extrusion apparatus (see, e.g., Spuch and Navarro, Journal of Drug Delivery, vol. 2011, Article ID 469679, 12 pages, 2011. doi:10.1155/2011/469679 for review). Extruded lipids can be prepared by extruding through filters of decreasing size, as described in Templeton et al., Nature Biotech, 15:647-652, 1997, the teachings of which relating to extruded lipid preparation are incorporated herein by reference.

[0327] Methods and compositions provided herein may comprise a pharmaceutical composition administered by a regimen sufficient to alleviate a symptom of a disease, disorder, and/or condition. In some aspects, the present disclosure provides methods of delivering a therapeutic by administering compositions as described herein.

### Uses

[0328] The present disclosure is further directed to uses of the site-specific disrupting agents or systems disclosed herein. Among other things, in some embodiments such provided technologies may be used to achieve modulation, e.g., repression, of expression of a target plurality of genes and, for example, enable control of the activity, delivery, and penetrance of one or more products of a target plurality of genes, e.g., in a cell. In some embodiments, a cell is a mammalian, e.g., human, cell. In some embodiments, a cell is a somatic cell. In some embodiments, a cell is a primary cell. For example, in some embodiments, a cell is a mammalian somatic cell. In some embodiments, a mammalian somatic cell is a primary cell. In some embodiments, a mammalian somatic cell is a non-embryonic cell.

### Modulating Gene Expression

[0329] The present disclosure is further directed, in part, to a method of modulating, e.g., decreasing, expression of a target plurality of genes, comprising providing a site-specific disrupting agent or a system described herein (or a nucleic acid encoding the same, or pharmaceutical composition comprising said site-specific disrupting agent or nucleic acid), and contacting the target plurality of genes, an anchor sequence associated with the target plurality of genes, and/or a genomic complex (e.g., ASMC) comprising the target plurality of genes with the site-specific disrupting agent or a system. In some embodiments, modulating, e.g., decreasing, expression of a target plurality of genes comprises modulation of transcription of a gene of the target plurality of genes as compared with a reference value, e.g., transcription of the gene in the absence of the site-specific disrupting agent or a system. In some embodiments, the method of modulating, e.g., decreasing, expression of a target plurality of genes is used ex vivo, e.g., on a cell from a subject, e.g., a mammalian subject, e.g., a human subject. In some embodiments, the cell is a mammalian, e.g., human, cell. In some embodiments, the cell is a somatic cell. In some embodiments, the cell is a primary cell. In some embodiments, the method of modulating, e.g., decreasing, expression of a target plurality of genes is used in vivo, e.g., on a mammalian subject, e.g., a human subject. In some embodiments, the method of modulating, e.g., decreasing, expression of a target plurality of genes is used in vitro, e.g., on a cell or cell line described herein.

[0330] Without wishing to be bound by theory, in some embodiments it is thought that a site-specific disrupting agent or a system may modulate the expression of a target plurality of genes by binding to an anchor sequence of a genomic complex, e.g., ASMC, comprising the target plurality of genes, and having one, two, or all of the following effects: physically or sterically blocking (e.g., competitively inhibiting) binding of a genomic complex component (e.g., nucleating polypeptide) to the anchor sequence; epigenetically modifying the target plurality of genes, a transcription control element operably linked to the target plurality of genes, or an anchor sequence proximal to the target plurality of genes or associated with an anchor sequence-mediated conjunction comprising the target plurality of genes (e.g., thereby decreasing and/or eliminating binding of a genomic complex component, e.g., nucleating polypeptide, to the anchor sequence); or genetically modifying the target plurality of genes, a transcription control element operably linked to the target plurality of genes, or an anchor sequence proximal to the target plurality of genes or associated with an anchor sequence-mediated conjunction comprising the target plurality of genes (e.g., thereby decreasing and/or eliminating binding of a genomic complex component, e.g., nucleating polypeptide, to the anchor sequence).

[0331] In some embodiments, a method described herein modulates, e.g., decreases, the expression of two or more genes of a target plurality of genes. In some embodiments, a method described herein modulates, e.g., decreases, the expression of at least 2, 3, 4, 5, 6, 7, 8, 9, 10, 11, 12, 13, 14, 15, 16, 17, 18, 19, or 20 (and optionally, no more than 2, 3, 4, 5, 6, 7, 8, 9, 10, 11, 12, 13, 14, 15, 16, 17, 18, 19, 20, or 30) genes of a target plurality of genes. In some embodiments, a method described herein modulates, e.g., decreases, the expression of 2-20, 2-18, 2-16, 2-14, 2-12, 2-10, 2-9, 2-8, 2-7, 2-6, 2-5, 2-4, 2-3, 3-20, 3-18, 3-16, 3-14, 3-12, 3-10, 3-9, 3-8, 3-7, 3-6, 3-5, 3-4, 4-20, 4-18, 4-16, 4-14, 4-12, 4-10, 4-9, 4-8, 4-7, 4- 6, 4-5, 5-20, 5-18, 5-16, 5-14, 5-12, 5-10, 5-9, 5-8, 5-7, 5-6, 6-20, 6-18, 6-16, 6-14, 6-12, 6-10, 6-9, 6-8, 6-7, 7-20, 7-18, 7-16, 7-14, 7-12, 7-10, 7-9, 7-8, 8-20, 8-18, 8-16, 8-14, 8-12, 8-10, 8-9, 9-20, 9-18, 9-16, 9-14, 9-12, 9-10, 10-20, 10-18, 10-16, 10-14, 10-12, 12-20, 12-18, 12-16, 12-14, 14-20, 14-18, 14-16, 16-20, 16-18, or 18-20 genes of a target plurality of genes. In some embodiments, a method described herein modulates, e.g., decreases, the expression of each gene (e.g., all genes) of a target plurality of genes.

[0332] In some embodiments, a method described herein modulates, e.g., decreases, the expression of a gene of a target plurality of genes, wherein one or more (e.g., 1, 2, 3, 4, 5, 6, 7, 8, 9, 10 or more, e.g., all) of the genes is a cytokine, an interleukin, a transcription factor (e.g., an interferon regulatory transcription factor), intercellular adhesion molecule (ICAM), or an interferon receptor. In some embodiments, a method described herein modulates, e.g., decreases, the level of RNA, e.g., mRNA, produced from one or more (e.g., 1, 2, 3, 4, 5, 6, 7, 8, 9, 10 or more, e.g., all) genes of the target plurality of genes. In some embodiments, modulating expression comprises decreasing the level of protein produced from one or more (e.g., 1, 2, 3, 4, 5, 6, 7, 8, 9, 10 or more, e.g., all) genes of the target plurality of genes. In some embodiments, modulating expression comprises both decreasing the level of mRNA and protein produced from one or more (e.g., 1, 2, 3, 4, 5, 6, 7, 8, 9, 10 or more, e.g., all) genes of the target plurality of genes. In some embodiments, the decrease is a decrease of at least 10%, 20%, 30%, 40%, 50%, 60%, 70%, 80%, or 90% compared to pre-treatment levels or levels in the absence of the site-specific disrupting agent.

[0333] In some embodiments, a method described herein modulates, e.g., decreases, the expression of one or more of (e.g., 1, 2, 3, or all of) human CXCL1, CXCL2, CXCL3, CXCL4, CXCL5, CXCL6, CXCL7, and IL8, e.g., upon stimulation of the cell with TNF-alpha, e.g., using an assay of any of Examples 2 or 4-11. In some embodiments, a method described herein modulates, e.g., decreases, the expression of one or more of (e.g., 1, 2, 3, or all of) mice CXCL1, CXCL2, CXCL3, CXCL4, CXCL5, CXCL7, and CXCL15, e.g., upon stimulation of the cell with TNF-alpha, e.g., using an assay of Example 14.

[0334] In some embodiments, a method described herein decreases binding of a nucleating polypeptide, e.g., CTCF, to an anchor sequence. In some embodiments, contacting a cell or administering a site-specific disrupting agent results in a decrease in binding of a nucleating polypeptide, e.g., CTCF, to an anchor sequence (e.g., an anchor sequence of an ASMC comprising a target plurality of genes). In some embodiments, contacting a cell or administering a site-specific disrupting agent results in a complete loss of binding or a decrease of at least 50, 60, 70, 80, 90, 95, or 99%, e.g., as measured by ChIP and/or quantitative PCR, relative to the binding of the nucleating polypeptide (e.g., CTCF) to the anchor sequence prior to treatment with the site-specific disrupting agent or the system or in the absence of the site-specific disrupting agent or the system.

[0335] The present disclosure is further directed, in part, to a method of treating a condition associated with over-expression of a target plurality of genes in a subject, comprising administering to the subject a site-specific disrupting agent, a system, a nucleic acid, a vector, a cell, or a pharmaceutical composition described herein. Conditions associated with over-expression of particular genes are known to those of skill in the art. Such conditions include, but are not limited to, metabolic disorders, neuromuscular disorders, cancer (e.g., solid tumors), fibrosis, diabetes, urea disorders, immune disorders, inflammation, and arthritis. In some embodiments, the disorder is an auto-immune disorder. In some embodiments, the disorder is associated with or caused by an infection, e.g., a viral infection, e.g., SARS-Cov2 viral infection.

[0336] The present disclosure is further directed, in part, to a method of modulating, e.g., decreasing, expression of a target plurality of genes, in a cell in a subject, e.g., a human subject. In some embodiments, the subject has a disease or condition. In some embodiments, the disease is an inflammatory disease, e.g., an immune mediated inflammatory disease. In some embodiments, the disease or condition is one or more of rheumatoid arthritis, gout, asthma, neutrophilic asthma, neutrophilic dermatosis, paw edema, acute respiratory disease syndrome (ARDS), COVID-19, psoriasis, inflammatory bowel disease, infection (e.g., by a pathogen, e.g., a bacteria, a viruses, or a fungus), external injury (e.g., scrapes or foreign objects), effects of radiation or chemical injury, osteoarthritis, osteoarthritic joint pain, joint pain, inflammatory pain, acute pain, chronic pain, cystisis, bronchitis, dermatitis, cardiovascular disease, neurodegenerative disease, liver disease, lung disease, kidney disease, pain, swelling, stiffness, tenderness, redness, warmth, or elevated biomarkers related to disease states (e.g., cytokines, immune receptors, or inflammatory markers). In some embodiments, the inflammatory disorder is associated with an infection, e.g., by a virus, e.g., Sars-Cov-2 virus. In some embodiments, the inflammatory disorder is an autoimmune disorder.

[0337] Methods and compositions as provided herein may treat a condition associated with over-expression of a target plurality of genes by stably or transiently altering (e.g., decreasing) transcription of a target plurality of genes. In some embodiments, such a modulation persists for at least about 1 hr to about 30 days, or at least about 2 hrs, 6 hrs, 12 hrs, 18 hrs, 24 hrs, 2 days, 3, days, 4 days, 5 days, 6 days, 7 days, 8 days, 9 days, 10 days, 11 days, 12 days, 13 days, 14 days, 15 days, 16 days, 17 days, 18 days, 19 days, 20 days, 21 days, 22 days, 23 days, 24 days, 25 days, 26 days, 27 days, 28 days, 29 days, 30 days, or longer or any time therebetween. In some embodiments, such a modulation persists for at least 1, 2, 3, 4, 5, 6, 7, 8, 9, 10, 11, 12, 13, 14, 15, 16, 17, 18, 19, 20, 21, 22, 23, or 24 hours, or at least 1, 2, 3, 4, 5, 6, or 7 days, or at least 1, 2, 3, 4, or 5 weeks, or at least 1, 2, 3, 4, 5, 6, 7, 8, 9, 10, 11, or 12 months, or at least 1, 2, 3, 4, or 5 years (e.g., indefinitely). Optionally, such a modulation persists for no more than 10, 9, 8, 7, 6, 5, 4, 3, 2, or 1 years.

[0338] In some embodiments, a method or composition provided herein may decrease expression of a gene of a target plurality of genes in a cell by at least 10, 20, 30, 40, 50, 60, 70, 80, 90, or 100% (and optionally up to 100%) relative to expression of the gene of the target plurality of genes in a cell not contacted by the composition or treated with the method. In some embodiments, a method or composition provided herein may decrease expression of each gene of a target plurality of genes in a cell by at least 10, 20, 30, 40, 50, 60, 70, 80, 90, or 100% (and optionally up to 100%) relative to expression of each gene of the target plurality of genes in a cell not contacted by the composition or treated with the method.

[0339] In some embodiments, a method provided herein may modulate, e.g., decrease, expression of a target plurality of genes by disrupting a genomic complex, e.g., an anchor sequence-mediated conjunction, comprising said target plurality of genes. In some embodiments, a method described herein disrupts a genomic complex (e.g., ASMC). In some embodiments, contacting a cell or administering a site-specific disrupting agent results in a decrease in the level of a genomic complex (e.g., ASMC) comprising the target plurality of genes relative to the level of the complex prior to treatment with the site-specific disrupting agent or the system or in the absence of the site-specific disrupting agent or the system. In some embodiments, contacting a cell or administering a site-specific disrupting agent results in a complete loss of the genomic complex, e.g., ASMC, or a decrease of at least 25, 30, 35, 40, 45, 50, 60, 70, 80, 90, 95, or 99%, e.g., as measured by ChIA-PET, ELISA (e.g., to assess gene expression changes), CUT&RUN, ATAC-SEQ, ChIP and/or quantitative PCR, relative to the level of the complex prior to treatment with the site-specific disrupting agent or the system or in the absence of the site-specific disrupting agent or the system.

[0340] In some embodiments, methods and compositions as provided herein may treat a condition associated with cascade of inflammation or cytokine storm by decreasing recruitment of cytokines in the site of inflammation. In some embodiments, the cascade of inflammation and/or cytokine storm is associated with an inflammatory disorder, e.g., a viral mediated inflammatory disorder, e.g., COVID-19 infection. In some embodiments, the inflammatory disorder is associated with an infection, e.g., by a virus, e.g., Sars-Cov-2 virus. In some embodiments, the inflammatory disorder is an autoimmune disorder. In some embodiments, the inflammatory disorder is associated with hypoxia. In some embodiments, the inflammatory disorder is associated with ARDS, hypoxia, and/or sepsis. In some embodiments, the infection is a super infection, e.g., caused by more than one pathogen, e.g., a first virus or a bacterium, or a fungus, and a second virus, or a second bacterium, or a second fungus.

### Epigenetic Modification

[0341] The present disclosure is further directed, in part, to a method of epigenetically modifying: one or more (e.g., all) genes of a target plurality of genes; a transcription control element operably linked to the target plurality of genes; an anchor sequence proximal to the target plurality of genes or associated with an anchor sequence-mediated conjunction comprising the target plurality of genes; or a site proximal to said anchor sequence, the method comprising providing a site-specific disrupting agent, a system, a nucleic acid encoding the site-specific disrupting agent, nucleic acids encoding the components of the system, or pharmaceutical composition comprising said site-specific disrupting agent, system or nucleic acid; and contacting the one or more (e.g., all) genes of the target plurality of genes, a transcription control element operably linked to the target plurality of genes, an anchor sequence proximal to the target plurality of genes or associated with an anchor sequence-mediated conjunction comprising the target plurality of genes, or a site proximal to said anchor sequence with the site-specific disrupting agent or the system, thereby epigenetically modifying the target plurality of genes, a transcription control element operably linked to the target plurality of genes, an anchor sequence proximal to the target plurality of genes or associated with an anchor sequence-mediated conjunction comprising the target plurality of genes, or a site proximal to said anchor sequence.

[0342] In some embodiments, a method of epigenetically a target plurality of genes, a transcription control element operably linked to the target plurality of genes, an anchor sequence proximal to the target plurality of genes or associated with an anchor sequence-mediated conjunction comprising the target plurality of genes, or a site proximal to said anchor sequence comprises increasing or decreasing DNA methylation of the target plurality of genes, a transcription control element operably linked to the target plurality of genes, an anchor sequence proximal to the target plurality of genes or associated with an anchor sequence-mediated conjunction comprising the target plurality of genes, or a site proximal to said anchor sequence. In some embodiments, a method of epigenetically modifying target plurality of genes, a transcription control element operably linked to the target plurality of genes, an anchor sequence proximal to the target plurality of genes or associated with an anchor sequence-mediated conjunction comprising the target plurality of genes, or a site proximal to said anchor sequence comprises increasing or decreasing histone methylation of a histone associated with the target plurality of genes, a transcription control element operably linked to the target plurality of genes, an anchor sequence proximal to the target plurality of genes or associated with an anchor sequence-mediated conjunction comprising the target plurality of genes, or a site proximal to said anchor sequence. In some embodiments, a method of epigenetically modifying a target plurality of genes, a transcription control element operably linked to the target plurality of genes, an anchor sequence proximal to the target plurality of genes or associated with an anchor sequence-mediated conjunction comprising the target plurality of genes, or a site proximal to said anchor sequence comprises decreasing histone acetylation of a histone associated with the target plurality of genes, a transcription control element operably linked to the target plurality of genes, an anchor sequence proximal to the target plurality of genes or associated with an anchor sequence-mediated conjunction comprising the target plurality of genes, or a site proximal to said anchor sequence. In some embodiments, a method of epigenetically modifying a target plurality of genes, a transcription control element operably linked to the target plurality of genes, an anchor sequence proximal to the target plurality of genes or associated with an anchor sequence-mediated conjunction comprising the target plurality of genes, or a site proximal to said anchor sequence comprises increasing or decreasing histone sumoylation of a histone associated with the target plurality of genes, a transcription control element operably linked to the target plurality of genes, an anchor sequence proximal to the target plurality of genes or associated with an anchor sequence-mediated conjunction comprising the target plurality of genes, or a site proximal to said anchor sequence. In some embodiments, a method of epigenetically modifying a target plurality of genes, a transcription control element operably linked to the target plurality of genes, an anchor sequence proximal to the target plurality of genes or associated with an anchor sequence-mediated conjunction comprising the target plurality of genes, or a site proximal to said anchor sequence comprises increasing or decreasing histone phosphorylation of a histone associated with the target plurality of genes, a transcription control element operably linked to the target plurality of genes, an anchor sequence proximal to the target plurality of genes or associated with an anchor sequence-mediated conjunction comprising the target plurality of genes, or a site proximal to said anchor sequence.

[0343] In some embodiments, a method of epigenetically modifying a target plurality of genes, a transcription control element operably linked to the target plurality of genes, an anchor sequence proximal to the target plurality of genes or associated with an anchor sequence-mediated conjunction comprising the target plurality of genes, or a site proximal to said anchor sequence may decrease the level of the epigenetic modification by at least 10, 20, 30, 40, 50, 60, 70, 80, 90, or 100% (and optionally up to 100%) relative to the level of the epigenetic modification at that site in a cell not contacted by the composition or treated with the method. In some embodiments, a method of epigenetically modifying a target plurality of genes, a transcription control element operably linked to the target plurality of genes, an anchor sequence proximal to the target plurality of genes or associated with an anchor sequence-mediated conjunction comprising the target plurality of genes, or a site proximal to said anchor sequence may increase the level of the epigenetic modification by at least 10, 20, 30, 40, 50, 60, 70, 80, 90, 100, 120, 140, 160, 180, 200, 300, 400, 500, 600, 700, 800, 900, or 1000% (and optionally up to 200, 300, 400, 500, 600, 700, 800, 900, 1000, or 2000%) relative to the level of the epigenetic modification at that site in a cell not contacted by the composition or treated with the method. In some embodiments epigenetic modification of a target plurality of genes, a transcription control element operably linked to the target plurality of genes, an anchor sequence proximal to the target plurality of genes or associated with an anchor sequence-mediated conjunction comprising the target plurality of genes, or a site proximal to said anchor sequence may modify the level of expression of the target plurality of genes, e.g., as described herein.

[0344] In some embodiments, an epigenetic modification produced by a method described herein persists for at least about 1 hour to about 30 days, or at least about 2 hours, 6 hours, 12 hours, 18 hours, 24 hours, 2 days, 3, days, 4 days, 5 days, 6 days, 7 days, 8 days, 9 days, 10 days, 11 days, 12 days, 13 days, 14 days, 15 days, 16 days, 17 days, 18 days, 19 days, 20 days, 21 days, 22 days, 23 days, 24 days, 25 days, 26 days, 27 days, 28 days, 29 days, 30 days, or longer or any time there between. In some embodiments, such a modulation persists for at least 1, 2, 3, 4, 5, 6, 7, 8, 9, 10, 11, 12, 13, 14, 15, 16, 17, 18, 19, 20, 21, 22, 23, or 24 hours, or at least 1, 2, 3, 4, 5, 6, or 7 days, or at least 1, 2, 3, 4, or 5 weeks, or at least 1, 2, 3, 4, 5, 6, 7, 8, 9, 10, 11, or 12 months, or at least 1, 2, 3, 4, or 5 years (e.g., indefinitely). Optionally, such a modulation persists for no more than 10, 9, 8, 7, 6, 5, 4, 3, 2, or 1 years.

[0345] In some embodiments, a site-specific disrupting agent or a system for use in a method of epigenetically modifying a target plurality of genes, a transcription control element operably linked to the target plurality of genes, an anchor sequence proximal to the target plurality of genes or associated with an anchor sequence-mediated conjunction comprising the target plurality of genes, or a site proximal to said anchor sequence comprises an effector moiety that comprises an epigenetic modifying moiety. For example, an effector moiety may comprise an epigenetic modifying moiety with DNA methyltransferase activity, and an endogenous or naturally occurring target sequence (e.g., a gene of a target plurality of genes, a transcription control element operably linked to the target plurality of genes, an anchor sequence proximal to the target plurality of genes or associated with an anchor sequence-mediated conjunction comprising the target plurality of genes, or a site proximal to said anchor sequence) may be altered to increase its methylation (e.g., decreasing interaction of a transcription factor with a portion of a gene of a target plurality of genes or transcription control element, decreasing binding of a nucleating protein to an anchor sequence, and/or disrupting or preventing an anchor sequence-mediated conjunction), or may be altered to decrease its methylation (e.g., increasing interaction of a transcription factor with a portion of a gene of a target plurality of genes or transcription control element, increasing binding of a nucleating protein to an anchor sequence, and/or promoting or increasing strength of an anchor sequence-mediated conjunction).

### Genetic Modification

[0346] The present disclosure is further directed, in part, to a method of genetically modifying one or more (e.g., one, two, three, or all) genes of a target plurality of genes, a transcription control element operably linked to the target plurality of genes, or an anchor sequence proximal to the target plurality of genes or associated with an anchor sequence-mediated conjunction comprising the target plurality of genes, the method comprising providing a site-specific disrupting agent or a system or nucleic acid encoding the same or pharmaceutical composition comprising said site-specific disrupting agent, system or nucleic acid; and contacting the one or more (e.g., one, two, three, or all) genes of the target plurality of genes, a transcription control element operably linked to the target plurality of genes, or an anchor sequence proximal to the target plurality of genes or associated with an anchor sequence-mediated conjunction comprising the target plurality of genes with the site-specific disrupting agent, thereby genetically modifying the target plurality of genes, a transcription control element operably linked to the target plurality of genes, or an anchor sequence proximal to the target plurality of genes or associated with an anchor sequence-mediated conjunction comprising the target plurality of genes.

[0347] Genetic modification may comprise introducing one or more of an insertion, deletion, or substitution into a gene of a target plurality of genes, a transcription control element operably linked to the target plurality of genes, or an anchor sequence proximal to the target plurality of genes or associated with an anchor sequence-mediated conjunction comprising the target plurality of genes. In some embodiments, an insertion comprises addition of at least 150, 200, 250, 300, 400, 500, 600, 700, 800, 900, 1000, 1200, 1400, 1600, 1800, or 2000 nucleotides (and optionally no more than 3000, 2500, 2000, 1500, 1000, 900, 800, 700, 600, 500, 400, 300, or 200 nucleotides). In some embodiments, an insertion comprises addition of at least 1, 2, 3, 4, 5, 6, 7, 8, 9, 10, 15, 20, 25, 30, 35, 40, 50, 60, 70, 80, 90, or 100 nucleotides (and optionally no more than 200, 150, 100, 90, 80, 70, 60, 50, 40, 35, 30, 25, 20, 15, 10, 9, 8, 7, 6, 5, 4, 3, 2, or 1 nucleotide). In some embodiments, the insertion comprises addition of 1-10, 1-9, 1-8, 1-7, 1-6, 1-5, 1-4, 1-3, or 1-2 nucleotides. In some embodiments, a deletion comprises removal of at least 150, 200, 250, 300, 400, 500, 600, 700, 800, 900, 1000, 1200, 1400, 1600, 1800, or 2000 nucleotides (and optionally no more than 3000, 2500, 2000, 1500, 1000, 900, 800, 700, 600, 500, 400, 300, or 200 nucleotides). In some embodiments, a deletion comprises removal of at least 1, 2, 3, 4, 5, 6, 7, 8, 9, 10, 15, 20, 25, 30, 35, 40, 50, 60, 70, 80, 90, or 100 nucleotides (and optionally no more than 200, 150, 100, 90, 80, 70, 60, 50, 40, 35, 30, 25, 20, 15, 10, 9, 8, 7, 6, 5, 4, 3, 2, or 1 nucleotide). In some embodiments, the deletion comprises removal of 1-10, 1-9, 1-8, 1-7, 1-6, 1-5, 1-4, 1-3, or 1-2 nucleotides. In some embodiments, a substitution comprises alteration of at least 1, 2, 3, 4, 5, 6, 7, 8, 9, 10, 15, 20, 25, 30, 35, 40, 50, 60, 70, 80, 90, or 100 nucleotides (and optionally no more than 200, 150, 100, 90, 80, 70, 60, 50, 40, 35, 30, 25, 20, 15, 10, 9, 8, 7, 6, 5, 4, 3, 2, or 1 nucleotide). In some embodiments, the substitution comprises alteration of 1-10, 1-9, 1-8, 1-7, 1-6, 1-5, 1-4, 1-3, or 1-2 nucleotides.

[0348] In some embodiments, a genetic modification comprises an insertion, deletion, or substitution to an anchor sequence, e.g., associated with an ASMC comprising the target plurality of genes. In some embodiments, the genetic modification alters (e.g., decreases or increases) the binding of a genomic complex component, e.g., a nucleating polypeptide, to the anchor sequence. In some embodiments, the genetic modification abrogates (e.g., via an insertion, deletion, or substitution), wholly or in part, an anchor sequence, thereby decreasing or abolishing the binding of a nucleating polypeptide to the anchor sequence, e.g., and decreasing the presence of or abolishing an ASMC comprising said anchor sequence. Without wishing to be bound by theory, the disclosure contemplates use of a site-specific disrupting agent with genetic modification functionality to introduce an insertion, deletion, or substitution into an anchor sequence to decrease or eliminate the anchor sequence's participation in a genomic complex, e.g., ASMC, that comprises a target plurality of genes. As described elsewhere herein, such an alteration is expected to disrupt the genomic complex, e.g., ASMC, and may decrease expression of the target plurality of genes.

[0349] In some embodiments, the genetic modification comprises insertion of a sequence comprising an anchor sequence. Without wishing to be bound by theory, the disclosure contemplates use of a site-specific disrupting agent or a system with genetic modification functionality to introduce an exogenous anchor sequence into a gene of a target plurality of genes, a transcription control element operably linked to the target plurality of genes, or an anchor sequence proximal to the target plurality of genes or associated with an anchor sequence-mediated conjunction comprising the target plurality of genes. It is thought that the presence of a new anchor sequence may disrupt the formation and/or maintenance of a genomic complex, e.g., ASMC, comprising the target plurality of genes, thereby modulating, e.g., decreasing, expression of the target plurality of genes.

[0350] The following examples are provided to further illustrate some embodiments of the present disclosure but are not intended to limit the scope of the disclosure; it will be understood by their exemplary nature that other procedures, methodologies, or techniques known to those skilled in the art may alternatively be used.

### EXAMPLES

### Example 1: Decreasing Expression of an Exemplary Plurality of Genes

[0351] This example describes, in part, experiments demonstrating decreasing expression of a target plurality of genes comprising CXCL1, CXCL2, CXCL3, and IL8 using a site-specific disrupting agent comprising a CRISPR/Cas molecule and guide RNAs comprising the given guide sequences.

[0352] Transfection of RNPs comprising a site-specific disrupting agent comprising mRNA encoding CRISPR/Cas molecule (Cas9) and sgRNA Cas9/guide RNP complex was carried out by electroporation into THP-1 cells. Cells were cultured in RPMI+10% FBS. A parental line was also analyzed for comparison.

350 k cells were plated in quadruplicate for each edited cell line and the parental control into 24 well plates. One hour later 10 ng/ml of TNF alpha (Sigma Cat #654205) was added to 2 wells for each cell line. The remaining 2 wells are untreated as a control.

[0353] The edited and parental cells were incubated with TNF alpha for 24 hrs. After that time, DNA and RNA were isolated using the AllPrep DNA/RNA Kit (Qiagen), following the Manufacture's protocol. RNA samples were retrotranscribed to cDNA using LunaScript® RT SuperMix Kit (New England Biolabs) and analyzed by quantitative PCR using individual CXCL1, CXCL2, CXCL3 & IL8 specific TaqMan primer/probe sets with the TaqMan® Fast Advanced Master Mix (Thermo Fisher Scientific). CXCL1-3 & IL7 gene expression was quantified relative to the human GAPDH reference gene using the ΔΔCt method. Changes in gene expression were further quantified by measuring the fold increase in gene expression after TNF alpha treatment directly compared to the levels of gene expression in the untreated cells.

[0354] The CTCF anchors at both boundaries of the Insulated Genomic Domain (IGD) were located using ChIP-seq data, and the CTCF anchor sequences were identified computationally using the known CTCF position weight matrix (JASPAR). CRISPR (Sp Cas9) guides were chosen to target the CTCF anchor sequence.

[0355] The guides sequences are listed in the table below.

TABLE 4

| Guide Sequence | Genomic Coordinates | Guide |
|---|---|---|
| GGGGCCACTAGGGACAGGAT | chr19:55627120- | GD-28662 |
| (SEQ ID NO: 20) | 55627139 | |
| (non-target control) | | |
| AGCCCCACCTTGTGGTCAGA | chr4:74595464- | GD-28481 |
| (SEQ ID NO: 21) | 74595486 | |
| AGTGCTGCCTTCTGACCACA | chr4:74595457- | GD-28482 |
| (SEQ ID NO: 22) | 74595479 | |
| GCTGCCTTCTGACCACAAGG | chr4:74595460- | GD-28483 |
| (SEQ ID NO: 23) | 74595482 | |
| CCAGTATAAGCCCCACCTTG | chr4:74595472- | GD-28484 |
| (SEQ ID NO: 24) | 74595494 | |
| CTGCCTGTCCCATAAGGAGG | chr4:75000088- | GD-28485 |
| (SEQ ID NO: 25) | 75000110 | |
| GCACTGCCTGTCCCATAAGG | chr4:75000091- | GD-28486 |
| (SEQ ID NO: 26) | 75000113 | |
| GGTCCTCCTCCTTATGGGAC | chr4:75000085- | GD-28487 |
| (SEQ ID NO: 27) | 75000107 | |
| GCCTTGTTTTCGGCTCTAGA | chr4:75000157- | GD-28488 |
| (SEQ ID NO: 28) | 75000179 | |
| GCCATCTAGAGCCGAAAACA | chr4:75000156- | GD-28489 |
| (SEQ ID NO: 29) | 75000178 | |

### Example 2: Cytokine Expression Decrease in THP-1 Cells at 72 Hours

[0356] This example describes, in part, experiments demonstrating decreasing expression of a target plurality of genes comprising CXCL1, CXCL2, CXCL3, and IL8 using a site-specific disrupting agent comprising a CRISPR/Cas molecule and guide RNAs targeted to the anchor sequences of the ASMC comprising the target plurality of genes.

[0357] sgRNA and mRNA encoding Cas9 RNPs were electroporated into THP-1 cells. sgRNA sequences (from Example 1) were chosen to target one of the CTCF sites of the ASMC comprising CXCL1, CXCL2, CXCL3, and IL8. The transfected cells were incubated with 10 ng/ml TNF alpha for 24 hrs. After that time, DNA and RNA were isolated using the AllPrep DNA/RNA Kit (Qiagen), following the manufacturer's protocol. RNA samples were retrotranscribed to cDNA using LunaScript® RT SuperMix Kit (New England Biolabs) and analyzed by quantitative PCR using individual CXCL1, CXCL2, CXCL3 & IL8 specific TaqMan primer/probe sets with the TaqMan® Fast Advanced Master Mix (Thermo Fisher Scientific).

[0358] CXCL1-3 & IL8 gene expression was quantified relative to the human GAPDH reference gene using the ΔΔCt method. Changes in gene expression were further quantified by measuring the fold increase in gene expression after TNF alpha treatment directly compared to the levels of gene expression in the untreated cells. The results in FIG. 6 show that a site-specific disrupting agent comprising a CRISPR/Cas molecule and an sgRNA can be used to decrease CXCL1, CXCL2, CXCL3, and IL8 expression in THP-1 cells, and that expression is decreased at 72 hours post-treatment. The results also show that LNP delivery of said site-specific disrupting agent can be used to deliver effective amounts of the agent to the target cells.

[0359] Similar results were seen when the experiment was repeated with sgRNAs targeting the other CTCF site of the ASMC comprising CXCL1, CXCL2, CXCL3, and IL8 (data not shown).

### Example 3: Cytokine Protein Secretion of THP-1 Cells Decreased by Site-Specific Modulating Agent

[0360] This example describes, in part, experiments demonstrating decreasing secretion of CXCL1 and IL-8, two genes of a target plurality of genes, by treating cells using a site-specific disrupting agent comprising a CRISPR/Cas molecule and guide RNAs targeted to the anchor sequences of the ASMC comprising the target plurality of genes.

[0361] THP-1 cells were electroporated with RNPs comprising sgRNAs and mRNA encoding a site-specific disrupting agent comprising an exemplary CRISPR/Cas molecule (Cas9) as in previous Examples. sgRNAs (from Example 1) were targeted to one of the CTCF sites of the ASMC comprising CXCL1 and IL-8. Cells were stimulated with 10 ng/ml TNF alpha for 24 hours. After that time, cell supernatants were collected and frozen at −80 degrees ° C. Supernatants from cells contacted with 4 different sgRNAs, in addition to the mRNA encoding the CRISPR/Cas molecule, as well as an un-transfected positive control were screened for CXCL1 and IL-8 protein levels on a cytokine panel by Myriad Genetics Inc. FIG. 7 shows diminished levels of CXCL1 and IL8 were seen for each supernatant obtained from cells treated with sgRNA and CRISPR/Cas molecule RNPs, demonstrating a phenotypic response to ASMC disruption (e.g., by disrupting anchor sequence and nucleating polypeptide interactions, e.g., disrupting CTCF binding). This data is in agreement with the decreased mRNA expression seen by qPCR in Example 2.

[0362] Similar results were seen when the experiment was repeated with sgRNAs targeting the other CTCF site of the ASMC comprising CXCL1 and IL8 (data not shown).

### Example 4: CXCL3 Expression Decrease as Measured by qPCR

[0363] This example describes, in part, experiments demonstrating decreasing expression of CXCL3 by treating THP-1 cells using a site-specific disrupting agent comprising a CRISPR/Cas molecule and a variety of guide RNAs targeted to the anchor sequences of the ASMC comprising the target plurality of genes.

[0364] THP-1 cells were grown in RPMI+10% FBS. Cells were transfected with mRNA encoding a CRISPR/Cas molecule (Cas9) and sgRNA targeted to either of the CTCF sites of the ASMC comprising the target plurality of genes using LNPs. sgRNAs (from Example 1) used target the left or right CTCF site as indicated in FIG. 9A. Lipid nanoparticle (LNP) formulation using SSOP lipid mixture was carried out by using the NanoAssemblr® Spark™ from Precision NanoSystems Inc. For experimental conditions, 350 k cells/well were plated 72 hrs after LNP transfection for each transfected condition and the parental control into 24 well plates (see FIG. 8 flow chart). One hour later 10 ng/ml of TNF alpha (Sigma Cat #654205) was added to each well. Untreated parental cells were plated with and without 10 ng/ml TNF alpha.

[0365] The transfected cells were incubated with TNF alpha for 24 hrs. After that time, DNA and RNA were isolated using the AllPrep DNA/RNA Kit (Qiagen), following the Manufacture's protocol. RNA samples were retrotranscribed to cDNA using LunaScript® RT SuperMix Kit (New England Biolabs) and analyzed by quantitative PCR using individual CXCL3 TaqMan primer/probe sets with the TaqMan® Fast Advanced Master Mix (Thermo Fisher Scientific).

[0366] CXCL3 gene expression was quantified relative to the human GAPDH reference gene using the ΔΔCt method. Changes in gene expression were further quantified by measuring the fold increase in gene expression after TNF alpha treatment directly compared to the levels of gene expression in the untreated cells. The results show (FIG. 8 graph) that a site-specific disrupting agent comprising a CRISPR/Cas molecule and several different sgRNAs can be used to decrease CXCL3 expression in THP-1 cells. The results also show that LNP delivery of said site-specific disrupting agent can be used to deliver effective amounts of the agent to the target cells. The results also demonstrate that targeting the anchor sequence on either side of the ASMC comprising the target plurality of genes can decrease expression of the target plurality of genes.

[0367] Similar results were seen when the experiment was repeated with sgRNAs targeting the other CTCF site of the ASMC comprising CXCL1, CXCL2, CXCL3, and IL8 (data not shown).

### Example 5: CXCL1 and CXCL3 Expression is Decreased 3 Weeks Post-Transfection

[0368] This example describes, in part, experiments demonstrating a stable decrease in expression of CXCL1 and CXCL3 in THP-1 cells three weeks post-transfection with a site-specific disrupting agent comprising a CRISPR/Cas molecule and a variety of guide RNAs targeted to the anchor sequences of the ASMC comprising the target plurality of genes.

[0369] Cells and LNP were prepared, and samples analyzed as in Example 4, except that transfected cells were incubated for 3 weeks before TNF alpha stimulation (see FIG. 9A flow chart).

[0370] The results show (FIGS. 9A and 9B) that a site-specific disrupting agent comprising a CRISPR/Cas molecule and several different sgRNAs can be used to stably decrease CXCL1 and CXCL3 expression in THP-1 cells up to and including 3 weeks after treatment with LNPs comprising the agent(s). The results also demonstrate that targeting the anchor sequence on either side of the ASMC comprising the target plurality of genes can stably decrease expression of the target plurality of genes.

### Example 6: Agents Comprising KRAB Effector Moieties Decrease CXCL1 Expression

[0371] This example describes, in part, experiments demonstrating a decrease in expression of CXCL1 in THP-1 cells after transfection with a site-specific disrupting agent comprising a CRISPR/Cas molecule fused to a transcriptional repressor and a variety of guide RNAs targeted to the anchor sequences of the ASMC comprising the target plurality of genes.

[0372] THP-1 cells were grown in RPMI+10% FBS. Cells were transfected with mRNA encoding a CRISPR/Cas molecule fused to a transcriptional repressor, dCas9-KRAB, and sgRNA (from Example 1) targeted to either CTCF site of the ASMC comprising the target plurality of genes using LNPs. Lipid nanoparticle (LNP) formulation using SSOP lipid mixture was carried out by using the NanoAssemblr® Spark™ from Precision NanoSystems Inc. For experimental conditions, 350 k cells/well were plated 72 hrs after LNP transfection for each transfected condition and the parental control into 24 well plates. One hour later 10 ng/ml of TNF alpha (Sigma Cat #654205) was added to each well. Untreated parental cells were plated with and without 10 ng/ml TNF alpha. Transfection with mRNA encoding a CRISPR/Cas molecule (Cas9) and the sgRNAs (per the Examples 2, 4, and 5) was performed as a positive control.

[0373] The transfected cells were incubated with TNF alpha for 24 hrs. After that time, DNA and RNA were isolated using the AllPrep DNA/RNA Kit (Qiagen), following the Manufacture's protocol. RNA samples were retrotranscribed to cDNA using LunaScript® RT SuperMix Kit (New England Biolabs) and analyzed by quantitative PCR using individual CXCL1 specific TaqMan primer/probe sets with the TaqMan® Fast Advanced Master Mix (Thermo Fisher Scientific).

[0374] CXCL1 gene expression was quantified relative to the human GAPDH reference gene using the ΔΔCt method. Changes in gene expression were further quantified by measuring the fold increase in gene expression after TNF alpha treatment directly compared to the levels of gene expression in the untreated cells. The results show (FIG. 10) that a site-specific disrupting agent comprising a catalytically inactive CRISPR/Cas molecule fused to a transcriptional repressor, KRAB, and targeted to CTCF sites by different sgRNAs can be used to decrease CXCL1 expression in THP-1 cells. The decrease in expression was seen 72 hours post-transfection.

### Example 7: Agents Comprising EZH2 Effector Moieties Decrease CXCL1 Expression

[0375] This example describes, in part, experiments demonstrating a decrease in expression of CXCL1 in THP-1 cells after transfection with a site-specific disrupting agent comprising a CRISPR/Cas molecule fused to a histone methyltransferase (EZH2) and a variety of guide RNAs targeted to the anchor sequences of the ASMC comprising the target plurality of genes.

[0376] THP-1 cells were grown in RPMI+10% FBS. Cells were transfected with mRNA encoding a catalytically inactive CRISPR/Cas molecule (dCas9) fused to a histone deacetylase, dCas9-EZH2, and sgRNA (from Example 1) targeted to either CTCF site of the ASMC comprising the target plurality of genes using LNPs. Lipid nanoparticle (LNP) formulation using SSOP lipid mixture was carried out by using the NanoAssemblr® Spark™ from Precision NanoSystems Inc. For experimental conditions, 350 k cells/well were plated 72 hrs after LNP transfection for each transfected condition and the parental control into 24 well plates. One hour later 10 ng/ml of TNF alpha (Sigma Cat #654205) was added to each well. Untreated parental cells were plated with and without 10 ng/ml TNF alpha.

[0377] The transfected cells were incubated with TNF alpha for 24 hrs. After that time, DNA and RNA were isolated using the AllPrep DNA/RNA Kit (Qiagen), following the Manufacture's protocol. RNA samples were retrotranscribed to cDNA using LunaScript® RT SuperMix Kit (New England Biolabs) and analyzed by quantitative PCR using individual CXCL1 specific TaqMan primer/probe sets with the TaqMan® Fast Advanced Master Mix (Thermo Fisher Scientific).

[0378] CXCL1 gene expression was quantified relative to the human GAPDH reference gene using the ΔΔCt method. Changes in gene expression were further quantified by measuring the fold increase in gene expression after TNF alpha treatment directly compared to the levels of gene expression in the untreated cells. The results show (FIG. 11) that a site-specific disrupting agent comprising a catalytically inactive CRISPR/Cas molecule fused to a histone methyltransferase (EZH2) and targeted to CTCF sites by different sgRNAs can be used to decrease CXCL1 expression in THP-1 cells. The decrease in expression was seen 72 hours post-transfection.

### Example 8: Agents Comprising MQ1 Effector Moieties Decrease CXCL1 Expression

[0379] This example describes, in part, experiments demonstrating a decrease in expression of CXCL1 in THP-1 cells after transfection with a site-specific disrupting agent comprising a CRISPR/Cas molecule fused to a DNA methyltransferase (MQ1) and a variety of guide RNAs targeted to the anchor sequences of the ASMC comprising the target plurality of genes.

[0380] THP-1 cells were grown in RPMI+10% FBS. Cells were transfected with mRNA encoding a catalytically inactive CRISPR/Cas molecule (dCas9) fused to MQ1, dCas9-MQ1, and sgRNA (from Example 1) targeted to either CTCF site of the ASMC comprising the target plurality of genes using LNPs. Lipid nanoparticle (LNP) formulation using SSOP lipid mixture was carried out by using the NanoAssemblr® Spark™ from Precision NanoSystems Inc. For experimental conditions, 350 k cells/well were plated 72 hrs after LNP transfection for each transfected condition and the parental control into 24 well plates. One hour later 10 ng/ml of TNF alpha (Sigma Cat #654205) was added to each well. Untreated parental cells were plated with and without 10 ng/ml TNF alpha.

[0381] The transfected cells were incubated with TNF alpha for 24 hrs. After that time, DNA and RNA were isolated using the AllPrep DNA/RNA Kit (Qiagen), following the Manufacture's protocol. RNA samples were retrotranscribed to cDNA using LunaScript® RT SuperMix Kit (New England Biolabs) and analyzed by quantitative PCR using individual CXCL1 and CXCL3 specific TaqMan primer/probe sets with the TaqMan® Fast Advanced Master Mix (Thermo Fisher Scientific).

[0382] CXCL1 and 3 gene expression was quantified relative to the human GAPDH reference gene using the ΔΔCt method. Changes in gene expression were further quantified by measuring the fold increase in gene expression after TNF alpha treatment directly compared to the levels of gene expression in the untreated cells. The results show (FIG. 12) that a site-specific disrupting agent comprising a catalytically inactive CRISPR/Cas molecule fused to DNA methyltransferase (MQ1), and targeted to CTCF sites by different sgRNAs can be used to decrease CXCL1 expression in THP-1 cells. The decrease in expression was seen 72 hours post-transfection. Similar results were seen measuring CXCL3 expression (data not shown).

### Example 9: Durable CXCL1 Decrease in Expression After Cas9 or dCas9-EZH2 Treatment

[0383] This example describes, in part, experiments demonstrating a stable decrease in expression of CXCL1 in THP-1 cells up to 4 weeks after transfection with a site-specific disrupting agent comprising either a CRISPR/Cas molecule or a catalytically inactive CRISPR/Cas molecule fused to a histone deacetylase (EZH2) and an sgRNA targeted to an anchor sequence of the ASMC comprising the target plurality of genes comprising CXCL1.

[0384] Using the ATx™ Scalable Transfection System (MaxCyte), THP-1 cells grown in RPMI+10% FBS were electroporated with mRNA encoding either of the site-specific disrupting agents (Cas9 or dCas9-EZH2) and sgRNA (from Example 1) at 5 million cells per condition in processing assemblies. Samples of the transfected cells were harvested and incubated with TNF alpha for 24 hrs. This was repeated each week carried out to 4 weeks. After that time, DNA and RNA were isolated using the AllPrep DNA/RNA Kit (Qiagen) following the Manufacture's protocol. RNA samples were retrotranscribed to cDNA using LunaScript® RT SuperMix Kit (New England Biolabs) and analyzed by quantitative PCR using individual CXCL1, CXCL2, CXCL3 & IL8 specific TaqMan primer/probe sets with the TaqMan® Fast Advanced Master Mix (Thermo Fisher Scientific).

[0385] CXCL1 gene expression was quantified relative to the human GAPDH reference gene using the ΔΔCt method. Changes in gene expression were further quantified by measuring the fold increase in gene expression after TNF alpha treatment directly compared to the levels of gene expression in the untreated cells. The results show that (FIG. 13) a site-specific disrupting agent comprising a CRISPR/Cas molecule, or a catalytically inactive CRISPR/Cas molecule fused to a histone methyltransferase (EZH2) and targeted to a CTCF site by an sgRNA can be used to decrease CXCL1 expression in THP-1 cells. The decrease in expression is durable up to at least 4 weeks, and is also observed at 72 hours and 3 weeks post-transfection.

### Example 10: CXCL3 Expression Decreases Upon Treatment with EZH2-dCas9-KRAB and sgRNA

[0386] This example describes, in part, experiments demonstrating a decrease in expression of CXCL3 in THP-1 cells after transfection with a site-specific disrupting agent comprising a catalytically inactive CRISPR/Cas molecule fused to a histone methyltransferase (EZH2) and a transcriptional repressor (KRAB) and a variety of guide RNAs targeted to an anchor sequence of the ASMC comprising the target plurality of genes.

[0387] THP-1 cells were grown in RPMI+10% FBS. Several different site-specific disrupting agents were tested: G9A-dCas9-EZH2 (G9A fused to dCas9 fused to EZH2), G9A-dCas9-KRAB, and EZH2-dCas9-KRAB. Cells were transfected with mRNA encoding the site-specific disrupting agent, and sgRNA targeted to a CTCF site of the ASMC comprising the target plurality of genes using LNPs. The sgRNA was chosen to target a genomic DNA site proximal to the left CTCF site but some distance removed from the left CTCF site (e.g., 80, 160, 235, or 300 nucleotides from the CTCF site). Exemplary guide sequences targeting genomic DNA sites proximal to the left CTCF site, but some distance removed from the left CTCF site are given in Table 5.

TABLE 5

| | | Genomic | SEQ |
|---|---|---|---|
| Guide | Guide Sequence | Coordinates | ID No. |
| GD-29251 | CCAATGAAGATGAAACTGGG | chr4:74595215- | 30 |
| | | 74595237 | |
| GD-29252 | AACGTGCTTGCCTAAGATTC | chr4:74595370- | 31 |
| | | 74595392 | |
| GD-29253 | AGCCCTTAATCATATCTAGT | chr4:74595560- | 32 |
| | | 74595582 | |
| GD-29254 | CAGAGCTTAAGACCTGTACT | chr4:74595642- | 33 |
| | | 74595664 | |
| GD-29255 | GCCCACCTTGACCTTCACAA | chr4:74595787- | 34 |
| | | 74595809 | |

[0388] Lipid nanoparticle (LNP) formulation using SSOP lipid mixture was carried out by using the NanoAssemblr® Spark™ from Precision NanoSystems Inc. For experimental conditions, 350 k cells/well were plated 72 hrs after LNP transfection for each transfected condition and the parental control into 24 well plates. One hour later 10 ng/ml of TNF alpha (Sigma Cat #654205) was added to each well. Untreated parental cells were plated with and without 10 ng/ml TNF alpha.

[0389] The transfected cells were incubated with TNF alpha for 24 hrs. After that time, DNA and RNA were isolated using the AllPrep DNA/RNA Kit (Qiagen), following the Manufacture's protocol. RNA samples were retrotranscribed to cDNA using LunaScript® RT SuperMix Kit (New England Biolabs) and analyzed by quantitative PCR using individual CXCL1 and CXCL3 specific TaqMan primer/probe sets with the TaqMan® Fast Advanced Master Mix (Thermo Fisher Scientific).

[0390] CXCL1 and 3 gene expression was quantified relative to the human GAPDH reference gene using the ΔΔCt method. Changes in gene expression were further quantified by measuring the fold increase in gene expression after TNF alpha treatment directly compared to the levels of gene expression in the untreated cells. The results show (FIG. 14) that a site-specific disrupting agent comprising a catalytically inactive CRISPR/Cas molecule fused to a histone methyltransferase (EZH2) and a transcriptional repressor (KRAB), and targeted to a site proximal to a CTCF an sgRNA can be used to decrease CXCL3 expression in THP-1 cells. Similar results were seen measuring CXCL1 expression (data not shown).

### Example 11: CXCL1 Expression Decreases Upon Treatment with Site-Specific Disrupting Agents and sgRNA

[0391] This example describes, in part, experiments demonstrating a decrease in expression of CXCL1 in THP-1 cells after transfection with various exemplary site-specific disrupting agents including: a catalytically inactive CRISPR/Cas molecule fused to a DNA methyltransferase (DNMT33a/31); a catalytically inactive CRISPR/Cas molecule fused to a histone deacetylase (HDAC8); or a catalytically inactive CRISPR/Cas molecule fused to a histone deacetylase (HDAC8) and a histone methyltransferase (EZH2), and a variety of guide RNAs targeted to an anchor sequence of the ASMC comprising the target plurality of genes.

[0392] THP-1 cells were grown in RPMI+10% FBS. Several different site-specific disrupting agents were tested: dCas9-DNMT3a/31 (DNMT3a/31 fused to dCas9), dCas9-HDAC8, and EZH2-dCas9-HDAC8. Cells were transfected with mRNA encoding the site-specific disrupting agent, and sgRNA (from Example 1) targeted to either CTCF site of the ASMC comprising the target plurality of genes using LNPs. Lipid nanoparticle (LNP) formulation using SSOP lipid mixture was carried out by using the NanoAssemblr® Spark™ from Precision NanoSystems Inc. For experimental conditions, 350 k cells/well were plated 72 hrs after LNP transfection for each transfected condition and the parental control into 24 well plates. One hour later 10 ng/ml of TNF alpha (Sigma Cat #654205) was added to each well. Untreated parental cells were plated with and without 10 ng/ml TNF alpha.

[0393] The transfected cells were incubated with TNF alpha for 24 hrs. After that time, DNA and RNA were isolated using the AllPrep DNA/RNA Kit (Qiagen), following the Manufacture's protocol. RNA samples were retrotranscribed to cDNA using LunaScript® RT SuperMix Kit (New England Biolabs) and analyzed by quantitative PCR using individual CXCL1 specific TaqMan primer/probe sets with the TaqMan® Fast Advanced Master Mix (Thermo Fisher Scientific).

[0394] CXCL1 gene expression was quantified relative to the human GAPDH reference gene using the ΔΔCt method. Changes in gene expression were further quantified by measuring the fold increase in gene expression after TNF alpha treatment directly compared to the levels of gene expression in the untreated cells. The results show (FIG. 15) that a site-specific disrupting agent comprising dCas9-DNMT3a/31, dCas9-HDAC8, or EZH2-dCas9-HDAC8 can be used to decrease CXCL1 expression in THP-1 cells and that these agents were effective at decreasing cytokine expression when targeted to CTCF sites by several different sgRNAs.

### Example 12: CXCL Gene Cluster Expression Decreases Upon Treatment with dCas9-EZH2 and Guide 30183 in Human A549 Lung Cancer Epithelial Cells and IMR-90 Cells

[0395] This example demonstrates CXCL gene cluster expression decreases in Human A549 lung cancer epithelial cells and IMR-90 cells when treated with dCas9-EZH2 and guide 30183 (Controller 1). Human A549 cells (ATCC® CCL-185) & IMR-90 cells (ATCC®-CCL-186) were plated at 15,000 cells per well in a flat bottom cell culture treated plate in 100 μl of media. A549 cells received F12/K ATCC®-30-2004 media and IMR-90 cells received EMEM ATCC®-30-2003 media. Both complete medias were made with 10% FBS (VWR cat #97068-085). After 24 hours adhering to the plate, LNPs containing guide 30183 and EZH2-dCas9 controller were added to the media at a final concentration of 2 g/ml SSOP lipid mix. After 6 hours, media was replaced with 100 μl of appropriate media and cells were incubated for 72 hours. After completion of 72-hour incubation, TNF alpha (Sigma Cat #654205) was added to designated wells at 10 ng/ml final concentration and incubated for 24 hours. After 24 hours, RNA was isolated using the NucleoSpin® 96 RNA Core Kit (Macherey-Nagel Inc, cat #740466.4) following the Manufacture's protocol. RNA samples were retrotranscribed to cDNA using LunaScript® RT SuperMix Kit (New England Biolabs) and analyzed by quantitative PCR using individual specific TaqMan primer/probe sets with the TaqMan® Fast Advanced Master Mix (Thermo Fisher Scientific). Gene expression was quantified relative to the human ABL1 reference gene using the ΔΔCt method. Changes in gene expression were further quantified by measuring the fold increase in gene expression after TNF alpha treatment directly compared to the levels of gene expression in the untreated cells. Data showed that expression of genes in CXCL gene cluster (specifically, CXCL1, CXCL2, CXCL3, CXCL4, CXCL5, CXCL6, CXCL7, and IL-8) levels were down between 40-70% in Human A549 lung cancer epithelial cells when treated with dCas9-EZH2 (FIG. 17). The expression of genes in CXCL gene cluster, (specifically, CXCL1, CXCL2, CXCL3, and IL-8) levels were down about 50% in IMR-90 cells when the middle CTCF was target with dCas9-EZH2 and GD-30183 (FIG. 18).

### Example 13: CXCL Gene Cluster Expression Decreases Upon Treatment with dCas9-EZH2 and Guide GD-28481 in Human Monocytes

[0396] This example demonstrates CXCL gene cluster expression decreases in Human monocyte cells when treated with dCas based effector (Controller A).

[0397] Transfection of the Cas9/guide RNP complex was carried out by electroporation into THP-1 cells (ATCC-TIB-202) by Synthego.

[0398] Upon receiving edited cell lines, vials were thawed, and cells were cultured in RPMI+10% FBS (VWR cat #97068-085) for one week to allow cells to recover from freezing and thawing. A parental unedited THP1 cell line was also analyzed for comparison. 350,000 cells were plated in quadruplicate for the edited cell line and the parental control into 24 well plates. One hour later 10 ng/ml of TNF alpha (Sigma Cat #654205) was added. Untreated control wells were also used to compare fold increase in chemokine expression.

[0399] The edited and parental cells were incubated with TNF alpha for 24 hrs. Afterwards, DNA and RNA were isolated using the DNA/RNA All Prep Kit (Qiagen) following the Manufacture's protocol. RNA samples were reverse transcribed to cDNA using LunaScript® RT SuperMix Kit (New England Biolabs) and analyzed by quantitative PCR using individual CXCL1, CXCL2, CXCL3 & IL8 specific TaqMan primer/probe sets with the TaqMan® Fast Advanced Master Mix (Thermo Fisher Scientific).

[0400] CXCL1-3 & IL8 gene expression was quantified relative to the human GAPDH reference gene using the ΔΔCt method. Changes in gene expression were further quantified by measuring the fold increase in gene expression after TNF alpha treatment directly compared to the levels of gene expression in the untreated cells.

[0401] Data showed, at 24 hours post-dosing gene expression of CXCL1, CXCL2, CXCL3, and IL-8, decreased 65%, 55%, 88%, and 52% in monocytes treated with controller A compared to the CXCL1, CXCL2, CXCL3, and IL-8 gene expression respectively in untreated monocytes (FIG. 19).

### Example 14: Mouse CXCL Gene Cluster Expression Decreases Upon Treatment with dCas9-MQ1 and sgRNA Targeting Three Anchor Sequences in Hep 1.6 Cells

[0402] This example demonstrates mouse CXCL gene cluster expression downregulates when treated with dCas9-MQ1 and sgRNA targeting three anchor sequences in Hep 1.6 cells.

[0403] Mouse cells HEPA 1.6 (ATCC® CRL-1830) were plated at 10 k cells per well in a flat bottom cell culture treated plate in 100 μl of media (DMEM Gibco Cat #11995-065, 10% FBS VWR cat #97068-085). After 24 hours adhering to the plate, the cultures were divided in four treatment groups and three control groups. LNPs containing (i) guides GD-30594 and dCas9-MQ1 controller targeting Right CTCF, (ii) guide GD-30592 with dCas9-MQ1 effector targeting middle CTCF 1, (iii) guide GD-30593 with dCas9-MQ1 effector targeting middle CTCF and (iv) a combination of GD-30594, GD-30592 and GD-30593 with dCas9-MQ1 targeting both middle and right CTCF were added to the cell cultures under treatment group at a final concentration of 2 g/mL SSOP lipid mix. Untreated cells, cells treated with LNP, and cells treated with TNF and a LNP containing a transfection control guide were used as controls. After 6 hours, media was replaced with 100 μl of DMEM and cells were incubated for 72 hours. After completion of 72 hr incubation, TNF alpha (Sigma Cat #654245) is added to designated wells at 10 ng/ml final concentration and incubated for 24 hours. After 24 hrs, RNA was isolated using the NucleoSpin® 96 RNA Core Kit (Macherey-Nagel, cat #740466.4) following the Manufacture's protocol. RNA samples were retrotranscribed to cDNA using LunaScript® RT SuperMix Kit (New England Biolabs) and analyzed by quantitative PCR using individual specific TaqMan primer/probe sets with the TaqMan® Fast Advanced Master Mix (Thermo Fisher Scientific). Gene expression was quantified relative to the mouse HPRT reference gene using the ΔΔCt method. Changes in gene expression were further quantified by measuring the fold increase in gene expression after TNF alpha treatment directly compared to the levels of gene expression in the untreated cells.

[0404] Data demonstrated, cells treated with dCas9-MQ1 transfected using guides targeting the right or one of the two middle CTCF motifs in the CXCL gene cluster, showed some down regulation in all of the seven CXCL genes after TNF alpha stimulation (FIG. 21B). However, the entire CXCL gene cluster was significantly more downregulated when cells were treated with dCas9-MQ1 transfected using a combination of guides targeting both middle and right CTCF (FIG. 21B).

### Example 15: Systemic Administration of dCas9-MQ1 Demonstrates a Significant Decrease in Leukocyte Infiltration in the Inflamed Lungs

[0405] This example demonstrates that systemic administration of dCas9-MQ1 decrease leukocyte infiltration in vivo in mouse lungs.

[0406] Murine lipopolysaccharide (LPS) lung inflammation model was used to study acute inflammation in the lungs. LNP comprising DOTAP 1% PEG short ncRNA was used as control. Each mouse received 3 mg/kg dose of LNP-DOTAP or dCas9-MQ1 at −2 hour time via intravenous administration point. The mice were stimulated with 5 mg/kg of LPS via oral aspiration at 0 hours. A second dose of LNP-DOTAP or dCas9-MQ1 at 3 mg/kg was administered at +8 hour time point. Dexamethasone was administered intraperitoneally at 10 mg/kg dose at times 0, 24, and 48 hours. The animals were terminated at 72 hours and bronchiolar lavage fluid were collected from the lungs for flow staining. Reduction in neutrophil infiltration in BALF was used a measure to understand the severity of inflammatory response.

[0407] The bronchiolar lavage fluid collected from the lungs of dCas9-MQ1 treated animals showed about 5.0×10⁵ leukocyte count/mL. The sham group, i.e., healthy mice receiving no treatment did not have any significant presence of leukocyte in bronchiolar lavage fluid (BALF). The LPS treated mice, Dexamethasone treated mice, and LNP-DOTAP treated mice showed, about 8.0×10⁵ leukocyte count/mL, about 7.2×10⁵ leukocyte count/mL, and about 6.0×10⁵ leukocyte count/mL in the bronchiolar lavage fluid respectively (FIG. 22B). 56% decrease in neutrophils infiltration in broncho-alveolar lavage fluid (BALF) was also observed in mice 72 hours after treatment with dCas9-MQ1 compared to the disease control.

### Example 16: Systemic Administration of dCas9-MQ1 Demonstrates a Significant Decrease in Neutrophil Infiltration in BALF

[0408] This example analyzes BALF obtained in Example 15 to assess the cell population.

[0409] Flow cytometry analysis using the following staining panels below were used to assess the cell population in the BALF obtained in example 15 and the percentage of cells present in the BALF at the time of termination were documented (FIG. 23A). Neutrophil count in the BALF were also graphed using the antibody staining panel below.
[0410] alveolar macrophages: CD45⁺, Siglec F⁺, CD11b⁻, CD11c⁺
[0411] Neutrophils: CD45⁺, Siglec F⁻, CD11b⁺, CD11c⁻, Ly-6G⁺
[0412] T cells: CD45⁺, Siglec F⁻, CD11c⁻, CD3⁺
[0413] B cells: CD45⁺, Siglec F⁻, CD11c⁻, B220⁺ (FIG. 23B)
   Analysis showed, the leukocyte cell types that make up the majority of the infiltrating cells are neutrophils, followed by B cells, T cells, macrophages and other types of hematopoietic cells (FIG. 23A). The controller decreased the number of neutrophils infiltrating the lungs with significant difference compared to the +LPS disease group (FIG. 23B).

### Example 17: The Decrease of Leukocyte Cells in the BALF is Lung Specific

[0414] This example demonstrates that the reduction of Leukocyte cells in the BALF were lung specific suggesting the decrease was resulted from dCas9-MQ1 treatment.

[0415] Murine lipopolysaccharide (LPS) lung inflammation model was used to study acute inflammation in the lungs. LNP comprising DOTAP 1% PEG short ncRNA was used as control. Each mouse received 3 mg/kg dose of LNP-DOTAP or dCas9-MQ1 at −2 hour time via intravenous administration point. The mice were stimulated with 5 mg/kg of LPS via oral aspiration at 0 hours. A second dose of LNP-DOTAP or dCas9-MQ1 at 3 mg/kg was administered at +8 hour time point. Dexamethasone was administered intraperitoneally at 10 mg/kg dose at times 0, 24, and 48 hours. The animals were terminated at 72 hours and bronchiolar lavage fluid were collected from the lungs for flow staining. Peripheral blood was collected at 72h termination. Flow analysis using CD45⁺ antibody staining was used to determine the leukocyte population in the peripheral blood in each group. The leukocyte count obtained for each group were plotted in a graph.

[0416] The graph illustrated that the effect of decreasing leukocyte count in the BALF with the controller treatment was lung specific suggesting the decrease in leukocyte count was due to dCas9-MQ1 treatment instead of the mouse itself had a decrease in leukocyte population which would have shown lower leukocyte count in peripheral blood as well. The hematopoietic cell population in the peripheral blood was found to be similar across all groups (FIG. 24).

### Example 18: Systemic Administration of dCas9-MQ1 Demonstrates CXCL Gene Expression is Decreased in the Lung Tissue

[0417] This example demonstrates CXCL gene cluster expression downregulates in lung tissue upon systemic administration of dCas9-MQ1.

[0418] BALF was collected using the method described in example 15. Following BALF collection, half of the left lung lobe was snapped frozen to store for qPCR analysis. The lung tissue was homogenized, and RNA was extracted for qPCR analysis quantifying specifically for CXCL1-7 and CXCL15. Gene expression was quantified relative to the mouse GAPDH reference gene using the ΔΔCt method.

[0419] Data showed that the CXCL gene cluster expression was downregulated to varying extent upon in the lung tissue samples obtained from mice treated with dCas9-MQ1 compared to CXCL gene cluster expression in lung tissue samples obtained from mice that were not treated with dCas9-MQ1 (FIG. 25).

### Example 19: Decreasing CXCL Expression has a Beneficial Downstream Effect of Decreasing Cellular Recruitment and the Presence of Other Cytokines to the Site of Inflammation

[0420] Over-expression of the CXCL gene cluster produces chemokines that attract neutrophils. Chemokines that recruit inflammatory cells to the lung promote local inflammation, leading to severe pathogenesis. This example demonstrates downregulating CXCL expression has a beneficial downstream effect of reducing cellular recruitment leading to a reduction in the presence of other cytokines at the site of inflammation, suggesting downregulating CXCL expression is a promising method to reduce to the severity of inflammation pathogenesis.

[0421] BALF was collected using the method described in Example 15. Following BALF collection, half of the left lung lobe was snapped frozen to store for qPCR analysis. The lung tissue was homogenized, and RNA was extracted for qPCR analysis quantifying specifically for the total count of CXCL1, CXCL2, GM-CSF, and IL-6 protein in the BALF using multiplexing Luminex® instrument.

[0422] Data demonstrated that the lung tissues obtained from mice treated with dCas9-MQ1 showed a lower expression of CXCL1, CXCL2, GM-CSF, and IL-6 compared to the CXCL1, CXCL2, GM-CSF, and IL-6 expression found in the lung tissues obtained from mice that were not treated with dCas9-MQ1.

### EQUIVALENTS

[0423] It is to be understood that while the invention has been described in conjunction with the detailed description thereof, the foregoing description is intended to illustrate and not limit the scope of the invention, which is defined by the scope of the appended claims. Some aspects, advantages, and modifications are within the scope of the following claims.

The application's sequence listing, which the Patent Office published only in electronic form, follows.

SEQUENCE LISTING (247 sequences)

SEQ ID NO: 1 - DNA, 20 bp, Artificial Sequence
  Description of Artificial Sequence: Synthetic oligonucleotide
  modified_base (1)..(1): a, c, t, g, unknown or other
  modified_base (3)..(3): a, c, t, g, unknown or other
nbndccdshagrkgghrshv

SEQ ID NO: 2 - DNA, 20 bp, Artificial Sequence
  Description of Artificial Sequence: Synthetic oligonucleotide
  modified_base (18)..(18): a, c, t, g, unknown or other
  modified_base (20)..(20): a, c, t, g, unknown or other
vhsrhggkrgahsdccdnbn

SEQ ID NO: 3 - DNA, 10 bp, Artificial Sequence
  Description of Artificial Sequence: Synthetic oligonucleotide
  modified_base (8)..(8): a, c, t, g, unknown or other
ccgccatntt

SEQ ID NO: 4 - DNA, 10 bp, Artificial Sequence
  Description of Artificial Sequence: Synthetic oligonucleotide
  modified_base (3)..(3): a, c, t, g, unknown or other
aanatggcgg

SEQ ID NO: 5 - protein, 1367 aa, Artificial Sequence
  Description of Artificial Sequence: Synthetic polypeptide
DKKYSIGLDIGTNSVGWAVITDEYKVPSKKFKVLGNTDRHSIKKNLIGALLFDSGETAEATRLKRTARRRYTRRKNRICYLQEIFSNEMAKVDDSFFHRLEESFLVEEDKKHERHPIFGNIVDEVAYHEKYPTIYHLRKKLVDSTDKADLRLIYLALAHMIKFRGHFLIEGDLNPDNSDVDKLFIQLVQTYNQLFEENPINASGVDAKAILSARLSKSRRLENLIAQLPGEKKNGLFGNLIALSLGLTPNFKSNFDLAEDAKLQLSKDTYDDDLDNLLAQIGDQYADLFLAAKNLSDAILLSDILRVNTEITKAPLSASMIKRYDEHHQDLTLLKALVRQQLPEKYKEIFFDQSKNGYAGYIDGGASQEEFYKFIKPILEKMDGTEELLVKLNREDLLRKQRTFDNGSIPHQIHLGELHAILRRQEDFYPFLKDNREKIEKILTFRIPYYVGPLARGNSRFAWMTRKSEETITPWNFEEVVDKGASAQSFIERMTNFDKNLPNEKVLPKHSLLYEYFTVYNELTKVKYVTEGMRKPAFLSGEQKKAIVDLLFKTNRKVTVKQLKEDYFKKIECFDSVEISGVEDRFNASLGTYHDLLKIIKDKDFLDNEENEDILEDIVLTLTLFEDREMIEERLKTYAHLFDDKVMKQLKRRRYTGWGRLSRKLINGIRDKQSGKTILDFLKSDGFANRNFMQLIHDDSLTFKEDIQKAQVSGQGDSLHEHIANLAGSPAIKKGILQTVKVVDELVKVMGRHKPENIVIEMARENQTTQKGQKNSRERMKRIEEGIKELGSQILKEHPVENTQLQNEKLYLYYLQNGRDMYVDQELDINRLSDYDVDHIVPQSFLKDDSIDNKVLTRSDKNRGKSDNVPSEEVVKKMKNYWRQLLNAKLITQRKFDNLTKAERGGLSELDKAGFIKRQLVETRQITKHVAQILDSRMNTKYDENDKLIREVKVITLKSKLVSDFRKDFQFYKVREINNYHHAHDAYLNAVVGTALIKKYPKLESEFVYGDYKVYDVRKMIAKSEQEIGKATAKYFFYSNIMNFFKTEITLANGEIRKRPLIETNGETGEIVWDKGRDFATVRKVLSMPQVNIVKKTEVQTGGFSKESILPKRNSDKLIARKKDWDPKKYGGFDSPTVAYSVLVVAKVEKGKSKKLKSVKELLGITIMERSSFEKNPIDFLEAKGYKEVKKDLIIKLPKYSLFELENGRKRMLASAGELQKGNELALPSKYVNFLYLASHYEKLKGSPEDNEQKQLFVEQHKHYLDEIIEQISEFSKRVILADANLDKVLSAYNKHRDKPIREQAENIIHLFTLTNLGAPAAFKYFDTTIDRKRYTSTKEVLDATLIHQSITGLYETRIDLSQLGGD

SEQ ID NO: 6 - protein, 1367 aa, Artificial Sequence
  Description of Artificial Sequence: Synthetic polypeptide
DKKYSIGLAIGTNSVGWAVITDEYKVPSKKFKVLGNTDRHSIKKNLIGALLFDSGETAEATRLKRTARRRYTRRKNRICYLQEIFSNEMAKVDDSFFHRLEESFLVEEDKKHERHPIFGNIVDEVAYHEKYPTIYHLRKKLVDSTDKADLRLIYLALAHMIKFRGHFLIEGDLNPDNSDVDKLFIQLVQTYNQLFEENPINASGVDAKAILSARLSKSRRLENLIAQLPGEKKNGLFGNLIALSLGLTPNFKSNFDLAEDAKLQLSKDTYDDDLDNLLAQIGDQYADLFLAAKNLSDAILLSDILRVNTEITKAPLSASMIKRYDEHHQDLTLLKALVRQQLPEKYKEIFFDQSKNGYAGYIDGGASQEEFYKFIKPILEKMDGTEELLVKLNREDLLRKQRTFDNGSIPHQIHLGELHAILRRQEDFYPFLKDNREKIEKILTFRIPYYVGPLARGNSRFAWMTRKSEETITPWNFEEVVDKGASAQSFIERMTNFDKNLPNEKVLPKHSLLYEYFTVYNELTKVKYVTEGMRKPAFLSGEQKKAIVDLLFKTNRKVTVKQLKEDYFKKIECFDSVEISGVEDRFNASLGTYHDLLKIIKDKDFLDNEENEDILEDIVLTLTLFEDREMIEERLKTYAHLFDDKVMKQLKRRRYTGWGRLSRKLINGIRDKQSGKTILDFLKSDGFANRNFMQLIHDDSLTFKEDIQKAQVSGQGDSLHEHIANLAGSPAIKKGILQTVKVVDELVKVMGRHKPENIVIEMARENQTTQKGQKNSRERMKRIEEGIKELGSQILKEHPVENTQLQNEKLYLYYLQNGRDMYVDQELDINRLSDYDVAAIVPQSFLKDDSIDNKVLTRSDKARGKSDNVPSEEVVKKMKNYWRQLLNAKLITQRKFDNLTKAERGGLSELDKAGFIKRQLVETRQITKHVAQILDSRMNTKYDENDKLIREVKVITLKSKLVSDFRKDFQFYKVREINNYHHAHDAYLNAVVGTALIKKYPKLESEFVYGDYKVYDVRKMIAKSEQEIGKATAKYFFYSNIMNFFKTEITLANGEIRKRPLIETNGETGEIVWDKGRDFATVRKVLSMPQVNIVKKTEVQTGGFSKESILPKRNSDKLIARKKDWDPKKYGGFDSPTVAYSVLVVAKVEKGKSKKLKSVKELLGITIMERSSFEKNPIDFLEAKGYKEVKKDLIIKLPKYSLFELENGRKRMLASAGELQKGNELALPSKYVNFLYLASHYEKLKGSPEDNEQKQLFVEQHKHYLDEIIEQISEFSKRVILADANLDKVLSAYNKHRDKPIREQAENIIHLFTLTNLGAPAAFKYFDTTIDRKRYTSTKEVLDATLIHQSITGLYETRIDLSQLGGD

SEQ ID NO: 7 - protein, 1053 aa, Artificial Sequence
  Description of Artificial Sequence: Synthetic polypeptide
AKRNYILGLAIGITSVGYGIIDYETRDVIDAGVRLFKEANVENNEGRRSKRGARRLKRRRRHRIQRVKKLLFDYNLLTDHSELSGINPYEARVKGLSQKLSEEEFSAALLHLAKRRGVHNVNEVEEDTGNELSTKEQISRNSKALEEKYVAELQLERLKKDGEVRGSINRFKTSDYVKEAKQLLKVQKAYHQLDQSFIDTYIDLLETRRTYYEGPGEGSPFGWKDIKEWYEMLMGHCTYFPEELRSVKYAYNADLYNALNDLNNLVITRDENEKLEYYEKFQIIENVFKQKKKPTLKQIAKEILVNEEDIKGYRVTSTGKPEFTNLKVYHDIKDITARKEIIENAELLDQIAKILTIYQSSEDIQEELTNLNSELTQEEIEQISNLKGYTGTHNLSLKAINLILDELWHTNDNQIAIFNRLKLVPKKVDLSQQKEIPTTLVDDFILSPVVKRSFIQSIKVINAIIKKYGLPNDIIIELAREKNSKDAQKMINEMQKRNRQTNERIEEIIRTTGKENAKYLIEKIKLHDMQEGKCLYSLEAIPLEDLLNNPFNYEVDAIIPRSVSFDNSFNNKVLVKQEENSKKGNRTPFQYLSSSDSKISYETFKKHILNLAKGKGRISKTKKEYLLEERDINRFSVQKDFINRNLVDTRYATRGLMNLLRSYFRVNNLDVKVKSINGGFTSFLRRKWKFKKERNKGYKHHAEDALIIANADFIFKEWKKLDKAKKVMENQMFEEKQAESMPEIETEQEYKEIFITPHQIKHIKDFKDYKYSHRVDKKPNRKLINDTLYSTRKDDKGNTLIVNNLNGLYDKDNDKLKKLINKSPEKLLMYHHDPQTYQKLKLIMEQYGDEKNPLYKYYEETGNYLTKYSKKDNGPVIKKIKYYGNKLNAHLDITDDYPNSRNKVVKLSLKPYRFDVYLDNGVYKFVTVKNLDVIKKENYYEVNSKCYEEAKKLKKISNQAEFIASFYKNDLIKINGELYRVIGVNNDLLNRIEVNMIDITYREYLENMNDKRPPHIIKTIASKTQSIKKYSTDILGNLYEVKSKKHPQIIKKG

SEQ ID NO: 8 - DNA, 4101 bp, Artificial Sequence
  Description of Artificial Sequence: Synthetic polynucleotide
gacaagaagtacagcatcggcctggccatcggcaccaacagcgtgggctgggccgtgatcaccgacgagtacaaggtgcccagcaagaagttcaaggtgctgggcaacaccgaccggcacagcatcaagaagaacctgatcggcgccctgctgttcgacagcggcgagaccgccgaggccacccggctgaagcggaccgcccggcggcggtacacccggcggaagaaccggatctgctacctgcaggagatcttcagcaacgagatggccaaggtggacgacagcttcttccaccggctggaggagagcttcctggtggaggaggacaagaagcacgagcggcaccccatcttcggcaacatcgtggacgaggtggcctaccacgagaagtaccccaccatctaccacctgcggaagaagctggtggacagcaccgacaaggccgacctgcggctgatctacctggccctggcccacatgatcaagttccggggccacttcctgatcgagggcgacctgaaccccgacaacagcgacgtggacaagctgttcatccagctggtgcagacctacaaccagctgttcgaggagaaccccatcaacgccagcggcgtggacgccaaggccatcctgagcgcccggctgagcaagagccggcggctggagaacctgatcgcccagctgcccggcgagaagaagaacggcctgttcggcaacctgatcgccctgagcctgggcctgacccccaacttcaagagcaacttcgacctggccgaggacgccaagctgcagctgagcaaggacacctacgacgacgacctggacaacctgctggcccagatcggcgaccagtacgccgacctgttcctggccgccaagaacctgagcgacgccatcctgctgagcgacatcctgcgggtgaacaccgagatcaccaaggcccccctgagcgccagcatgatcaagcggtacgacgagcaccaccaggacctgaccctgctgaaggccctggtgcggcagcagctgcccgagaagtacaaggagatcttcttcgaccagagcaagaacggctacgccggctacatcgacggcggcgccagccaggaggagttctacaagttcatcaagcccatcctggagaagatggacggcaccgaggagctgctggtgaagctgaaccgggaggacctgctgcggaagcagcggaccttcgacaacggcagcatcccccaccagatccacctgggcgagctgcacgccatcctgcggcggcaggaggacttctaccccttcctgaaggacaaccgggagaagatcgagaagatcctgaccttccggatcccctactacgtgggccccctggcccggggcaacagccggttcgcctggatgacccggaaatccgaggagaccatcaccccctggaacttcgaggaggtggtggacaagggcgccagcgcccagagcttcatcgagcggatgaccaacttcgacaagaacctgcccaacgagaaggtgctgcccaagcacagcctgctgtacgagtacttcaccgtgtacaacgagctgaccaaggtgaagtacgtgaccgagggcatgcggaagcccgccttcctgagcggcgagcagaagaaggccatcgtggacctgctgttcaagaccaaccggaaggtgaccgtgaagcagctgaaggaggactacttcaagaagatcgagtgcttcgacagcgtggagatcagcggcgtggaggaccggttcaacgccagcctgggcacctaccacgacctgctgaagatcatcaaggacaaggacttcctggacaacgaggagaacgaggacatcctggaggacatcgtgctgaccctgaccctgttcgaggaccgggagatgatcgaggagcggctgaaaacctacgcccacctgttcgacgacaaggtgatgaagcagctgaagcggcggcggtacaccggctggggccggctgagccggaagctgatcaacggcatccgggacaagcagagcggcaagaccatcctggacttcctgaaatccgacggcttcgccaaccggaacttcatgcagctgatccacgacgacagcctgaccttcaaggaggacatccagaaggcccaggtgagcggccagggcgacagcctgcacgagcacatcgccaacctggccggcagccccgccatcaagaagggcatcctgcagaccgtgaaggtggtggacgagctggtgaaggtgatgggccggcacaagcccgagaacatcgtgatcgagatggcccgggagaaccagaccacccagaagggccagaagaacagccgggagcggatgaagcggatcgaggagggcatcaaggagctgggcagccagatcctgaaggagcaccccgtggagaacacccagctgcagaacgagaagctgtacctgtactacctgcagaacggccgggacatgtacgtggaccaggagctggacatcaaccggctgagcgactacgacgtggccgccatcgtgccccagagcttcctgaaggacgacagcatcgacaacaaggtgctgacccggagcgacaaggcccggggcaagagcgacaacgtgcccagcgaggaggtggtgaagaagatgaagaactactggcggcagctgctgaacgccaagctgatcacccagcggaagttcgacaacctgaccaaggccgagcggggcggcctgagcgagctggacaaggccggcttcatcaagcggcagctggtggagacccggcagatcaccaagcacgtggcccagatcctggacagccggatgaacaccaagtacgacgagaacgacaagctgatccgggaggtgaaggtgatcaccctgaaatccaagctggtgagcgacttccggaaggacttccagttctacaaggtgcgggagatcaacaactaccaccacgcccacgacgcctacctgaacgccgtggtgggcaccgccctgatcaagaagtaccccaagctggagagcgagttcgtgtacggcgactacaaggtgtacgacgtgcggaagatgatcgccaagagcgagcaggagatcggcaaggccaccgccaagtacttcttctacagcaacatcatgaacttcttcaagaccgagatcaccctggccaacggcgagatccggaagcggcccctgatcgagaccaacggcgagaccggcgagatcgtgtgggacaagggccgggacttcgccaccgtgcggaaggtgctgagcatgccccaggtgaacatcgtgaagaaaaccgaggtgcagaccggcggcttcagcaaggagagcatcctgcccaagcggaacagcgacaagctgatcgcccggaagaaggactgggaccccaagaagtacggcggcttcgacagccccaccgtggcctacagcgtgctggtggtggccaaggtggagaagggcaagagcaagaagctgaaatccgtgaaggagctgctgggcatcaccatcatggagcggagcagcttcgagaagaaccccatcgacttcctggaggccaagggctacaaggaggtgaagaaggacctgatcatcaagctgcccaagtacagcctgttcgagctggagaacggccggaagcggatgctggccagcgccggcgagctgcagaagggcaacgagctggccctgcccagcaagtacgtgaacttcctgtacctggccagccactacgagaagctgaagggcagccccgaggacaacgagcagaagcagctgttcgtggagcagcacaagcactacctggacgagatcatcgagcagatcagcgagttcagcaagcgggtgatcctggccgacgccaacctggacaaggtgctgagcgcctacaacaagcaccgggacaagcccatccgggagcaggccgagaacatcatccacctgttcaccctgaccaacctgggcgcccccgccgccttcaagtacttcgacaccaccatcgaccggaagcggtacaccagcaccaaggaggtgctggacgccaccctgatccaccagagcatcaccggcctgtacgagacccggatcgacctgagccagctgggcggcgac

SEQ ID NO: 9 - DNA, 3159 bp, Artificial Sequence
  Description of Artificial Sequence: Synthetic polynucleotide
gccaagcggaactacatcctgggcctggccatcggcatcaccagcgtgggctacggcatcatcgactacgagacccgggacgtgatcgacgccggcgtgcggctgttcaaggaggccaacgtggagaacaacgagggccggcggagcaagcggggcgcccggcggctgaagcggcggcggcggcaccggatccagcgggtgaagaagctgctgttcgactacaacctgctgaccgaccacagcgagctgagcggcatcaacccctacgaggcccgggtgaagggcctgagccagaagctgagcgaggaggagttcagcgccgccctgctgcacctggccaagcggcggggcgtgcacaacgtgaacgaggtggaggaggacaccggcaacgagctgagcaccaaggagcagatcagccggaacagcaaggccctggaggagaagtacgtggccgagctgcagctggagcggctgaagaaggacggcgaggtgcggggcagcatcaaccggttcaagaccagcgactacgtgaaggaggccaagcagctgctgaaggtgcagaaggcctaccaccagctggaccagagcttcatcgacacctacatcgacctgctggagacccggcggacctactacgagggccccggcgagggcagccccttcggctggaaggacatcaaggagtggtacgagatgctgatgggccactgcacctacttccccgaggagctgcggagcgtgaagtacgcctacaacgccgacctgtacaacgccctgaacgacctgaacaacctggtgatcacccgggacgagaacgagaagctggagtactacgagaagttccagatcatcgagaacgtgttcaagcagaagaagaagcccaccctgaagcagatcgccaaggagatcctggtgaacgaggaggacatcaagggctaccgggtgaccagcaccggcaagcccgagttcaccaacctgaaggtgtaccacgacatcaaggacatcaccgcccggaaggagatcatcgagaacgccgagctgctggaccagatcgccaagatcctgaccatctaccagagcagcgaggacatccaggaggagctgaccaacctgaacagcgagctgacccaggaggagatcgagcagatcagcaacctgaagggctacaccggcacccacaacctgagcctgaaggccatcaacctgatcctggacgagctgtggcacaccaacgacaaccagatcgccatcttcaaccggctgaagctggtgcccaagaaggtggacctgagccagcagaaggagatccccaccaccctggtggacgacttcatcctgagccccgtggtgaagcggagcttcatccagagcatcaaggtgatcaacgccatcatcaagaagtacggcctgcccaacgacatcatcatcgagctggcccgggagaagaacagcaaggacgcccagaagatgatcaacgagatgcagaagcggaaccggcagaccaacgagcggatcgaggagatcatccggaccaccggcaaggagaacgccaagtacctgatcgagaagatcaagctgcacgacatgcaggagggcaagtgcctgtacagcctggaggccatccccctggaggacctgctgaacaaccccttcaactacgaggtggacgccatcatcccccggagcgtgagcttcgacaacagcttcaacaacaaggtgctggtgaagcaggaggagaacagcaagaagggcaaccggacccccttccagtacctgagcagcagcgacagcaagatcagctacgagaccttcaagaagcacatcctgaacctggccaagggcaagggccggatcagcaagaccaagaaggagtacctgctggaggagcgggacatcaaccggttcagcgtgcagaaggacttcatcaaccggaacctggtggacacccggtacgccacccggggcctgatgaacctgctgcggagctacttccgggtgaacaacctggacgtgaaggtgaaatccatcaacggcggcttcaccagcttcctgcggcggaagtggaagttcaagaaggagcggaacaagggctacaagcaccacgccgaggacgccctgatcatcgccaacgccgacttcatcttcaaggagtggaagaagctggacaaggccaagaaggtgatggagaaccagatgttcgaggagaagcaggccgagagcatgcccgagatcgagaccgagcaggagtacaaggagatcttcatcaccccccaccagatcaagcacatcaaggacttcaaggactacaagtacagccaccgggtggacaagaagcccaaccggaagctgatcaacgacaccctgtacagcacccggaaggacgacaagggcaacaccctgatcgtgaacaacctgaacggcctgtacgacaaggacaacgacaagctgaagaagctgatcaacaagagccccgagaagctgctgatgtaccaccacgacccccagacctaccagaagctgaagctgatcatggagcagtacggcgacgagaagaaccccctgtacaagtactacgaggagaccggcaactacctgaccaagtacagcaagaaggacaacggccccgtgatcaagaagatcaagtactacggcaacaagctgaacgcccacctggacatcaccgacgactaccccaacagccggaacaaggtggtgaagctgagcctgaagccctaccggttcgacgtgtacctggacaacggcgtgtacaagttcgtgaccgtgaagaacctggacgtgatcaagaaggagaactactacgaggtgaacagcaagtgctacgaggaggccaagaagctgaagaagatcagcaaccaggccgagttcatcgccagcttctacaagaacgacctgatcaagatcaacggcgagctgtaccgggtgatcggcgtgaacaacgacctgctgaaccggatcgaggtgaacatgatcgacatcacctaccgggagtacctggagaacatgaacgacaagcggcccccccacatcatcaagaccatcgccagcaagacccagagcatcaagaagtacagcaccgacatcctgggcaacctgtacgaggtgaaatccaagaagcacccccagatcatcaagaagggc

SEQ ID NO: 10 - DNA, 1155 bp, Spiroplasma monobiae
agcaaggtggagaacaagaccaagaagctgcgggtgttcgaggccttcgccggcatcggcgcccagcggaaggccctggagaaggtgcggaaggacgagtacgagatcgtgggcctggccgagtggtacgtgcccgccatcgtgatgtaccaggccatccacaacaacttccacaccaagctggagtacaagagcgtgagccgggaggagatgatcgactacctggagaacaagaccctgagctggaacagcaagaaccccgtgagcaacggctactggaagcggaagaaggacgacgagctgaagatcatctacaacgccatcaagctgagcgagaaggagggcaacatcttcgacatccgggacctgtacaagcggaccctgaagaacatcgacctgctgacctacagcttcccctgccaggacctgagccagcagggcatccagaagggcatgaagcggggcagcggcacccggagcggcctgctgtgggagatcgagcgggccctggacagcaccgagaagaacgacctgcccaagtacctgctgatggagaacgtgggcgccctgctgcacaagaagaacgaggaggagctgaaccagtggaagcagaagctggagagcctgggctaccagaacagcatcgaggtgctgaacgccgccgacttcggcagcagccaggcccggcggcgggtgttcatgatcagcaccctgaacgagttcgtggagctgcccaagggcgacaagaagcccaagagcatcaagaaggtgctgaacaagatcgtgagcgagaaggacatcctgaacaacctgctgaagtacaacctgaccgagttcaagaaaaccaagagcaacatcaacaaggccagcctgatcggctacagcaagttcaacagcgagggctacgtgtacgaccccgagttcaccggccccaccctgaccgccagcggcgccaacagccggatcaagatcaaggacggcagcaacatccggaagatgaacagcgacgagaccttcctgtacatcggcttcgacagccaggacggcaagcgggtgaacgagatcgagttcctgaccgagaaccagaagatcttcgtgtgcggcaacagcatcagcgtggaggtgctggaggccatcatcgacaagatcggcggc

SEQ ID NO: 11 - protein, 386 aa, Spiroplasma monobiae
MSKVENKTKKLRVFEAFAGIGAQRKALEKVRKDEYEIVGLAEWYVPAIVMYQAIHNNFHTKLEYKSVSREEMIDYLENKTLSWNSKNPVSNGYWKRKKDDELKIIYNAIKLSEKEGNIFDIRDLYKRTLKNIDLLTYSFPCQDLSQQGIQKGMKRGSGTRSGLLWEIERALDSTEKNDLPKYLLMENVGALLHKKNEEELNQWKQKLESLGYQNSIEVLNAADFGSSQARRRVFMISTLNEFVELPKGDKKPKSIKKVLNKIVSEKDILNNLLKYNLTEFKKTKSNINKASLIGYSKFNSEGYVYDPEFTGPTLTASGANSRIKIKDGSNIRKMNSDETFLYIGFDSQDGKRVNEIEFLTENQKIFVCGNSISVEVLEAIIDKIGG

SEQ ID NO: 12 - protein, 385 aa, Spiroplasma monobiae
SKVENKTKKLRVFEAFAGIGAQRKALEKVRKDEYEIVGLAEWYVPAIVMYQAIHNNFHTKLEYKSVSREEMIDYLENKTLSWNSKNPVSNGYWKRKKDDELKIIYNAIKLSEKEGNIFDIRDLYKRTLKNIDLLTYSFPCQDLSQQGIQKGMKRGSGTRSGLLWEIERALDSTEKNDLPKYLLMENVGALLHKKNEEELNQWKQKLESLGYQNSIEVLNAADFGSSQARRRVFMISTLNEFVELPKGDKKPKSIKKVLNKIVSEKDILNNLLKYNLTEFKKTKSNINKASLIGYSKFNSEGYVYDPEFTGPTLTASGANSRIKIKDGSNIRKMNSDETFLYIGFDSQDGKRVNEIEFLTENQKIFVCGNSISVEVLEAIIDKIGG

SEQ ID NO: 13 - protein, 96 aa, Homo sapiens
DAKSLTAWSRTLVTFKDVFVDFTREEWKLLDTAQQILYRNVMLENYKNLVSLGYQLTKPDVILRLEKGEEPWLVEREIHQETHPDSETAFEIKSSV

SEQ ID NO: 14 - DNA, 288 bp, Homo sapiens
gacgccaagagcctgaccgcctggagccggaccctggtgaccttcaaggacgtgttcgtggacttcacccgggaggagtggaagctgctggacaccgcccagcagatcctgtaccggaacgtgatgctggagaactacaagaacctggtgagcctgggctaccagctgaccaagcccgacgtgatcctgcggctggagaagggcgaggagccctggctggtggagcgggagatccaccaggagacccaccccgacagcgagaccgccttcgagatcaagagcagcgtg

SEQ ID NO: 15 - protein, 475 aa, Homo sapiens
GKIMYVGDVRSVTQKHIQEWGPFDLVIGGSPCNDLSIVNPARKGLYEGTGRLFFEFYRLLHDARPKEGDDRPFFWLFENVVAMGVSDKRDISRFLESNPVMIDAKEVSAAHRARYFWGNLPGMNRPLASTVNDKLELQECLEHGRIAKFSKVRTITTRSNSIKQGKDQHFPVFMNEKEDILWCTEMERVFGFPVHYTDVSNMSRLARQRLLGRSWSVPVIRHLFAPLKEYFACVSSGNSNANSRGPSFSSGLVPLSLRGSHMNPLEMFETVPVWRRQPVRVLSLFEDIKKELTSLGFLESGSDPGQLKHVVDVTDTVRKDVEEWGPFDLVYGATPPLGHTCDRPPSWYLFQFHRLLQYARPKPGSPRPFFWMFVDNLVLNKEDLDVASRFLEMEPVTIPDVHGGSLQNAVRVWSNIPAIRSRHWALVSEEELSLLAQNKQSSKLAAKWPTKLVKNCFLPLREYFKYFSTELTSSL

SEQ ID NO: 16 - DNA, 1626 bp, Homo sapiens
aaccacgaccaggagttcgacccccccaaggtgtacccccccgtgcccgccgagaagcggaagcccatccgggtgctgagcctgttcgacggcatcgccaccggcctgctggtgctgaaggacctgggcatccaggtggaccggtacatcgccagcgaggtgtgcgaggacagcatcaccgtgggcatggtgcggcaccagggcaagatcatgtacgtgggcgacgtgcggagcgtgacccagaagcacatccaggagtggggccccttcgacctggtgatcggcggcagcccctgcaacgacctgagcatcgtgaaccccgcccggaagggcctgtacgagggcaccggccggctgttcttcgagttctaccggctgctgcacgacgcccggcccaaggagggcgacgaccggcccttcttctggctgttcgagaacgtggtggccatgggcgtgagcgacaagcgggacatcagccggttcctggagagcaaccccgtgatgatcgacgccaaggaggtgagcgccgcccaccgggcccggtacttctggggcaacctgcccggcatgaaccggcccctggccagcaccgtgaacgacaagctggagctgcaggagtgcctggagcacggccggatcgccaagttcagcaaggtgcggaccatcaccacccggagcaacagcatcaagcagggcaaggaccagcacttccccgtgttcatgaacgagaaggaggacatcctgtggtgcaccgagatggagcgggtgttcggcttccccgtgcactacaccgacgtgagcaacatgagccggctggcccggcagcggctgctgggccggagctggagcgtgcccgtgatccggcacctgttcgcccccctgaaggagtacttcgcctgcgtgagcagcggcaacagcaacgccaacagccggggccccagcttcagcagcggcctggtgcccctgagcctgcggggcagccacatgaatcctctggagatgttcgagacagtgcccgtgtggagaaggcaacccgtgagggtgctgagcctcttcgaggacattaagaaggagctgacctctctgggctttctggaatccggcagcgaccccggccagctgaaacacgtggtggacgtgaccgacacagtgaggaaggacgtggaagagtggggcccctttgacctcgtgtatggagccacacctcctctcggccacacatgcgataggcctcccagctggtatctcttccagttccacagactgctccagtacgccagacctaagcccggcagccccagacccttcttctggatgttcgtggacaatctggtgctgaacaaggaggatctggatgtggccagcagatttctggagatggaacccgtgacaatccccgacgtgcatggcggctctctgcagaacgccgtgagagtgtggtccaacatccccgccattagaagcagacactgggctctggtgagcgaggaggaactgtctctgctggcccagaataagcagtcctccaagctggccgccaagtggcccaccaagctggtgaagaactgctttctgcctctgagggagtatttcaagtatttcagcaccgaactgaccagcagcctg

SEQ ID NO: 17 - protein, 745 aa, Homo sapiens
GQTGKKSEKGPVCWRKRVKSEYMRLRQLKRFRRADEVKSMFSSNRQKILERTEILNQEWKQRRIQPVHILTSVSSLRGTRECSVTSDLDFPTQVIPLKTLNAVASVPIMYSWSPLQQNFMVEDETVLHNIPYMGDEVLDQDGTFIEELIKNYDGKVHGDRECGFINDEIFVELVNALGQYNDDDDDDDGDDPEEREEKQKDLEDHRDDKESRPPRKFPSDKIFEAISSMFPDKGTAEELKEKYKELTEQQLPGALPPECTPNIDGPNAKSVQREQSLHSFHTLFCRRCFKYDCFLHPFHATPNTYKRKNTETALDNKPCGPQCYQHLEGAKEFAAALTAERIKTPPKRPGGRRRGRLPNNSSRPSTPTINVLESKDTDSDREAGTETGGENNDKEEEEKKDETSSSSEANSRCQTPIKMKPNIEPPENVEWSGAEASMFRVLIGTYYDNFCAIARLIGTKTCRQVYEFRVKESSIIAPAPAEDVDTPPRKKKRKHRLWAAHCRKIQLKKDGSSNHVYNYQPCDHPRQPCDSSCPCVIAQNFCEKFCQCSSECQNRFPGCRCKAQCNTKQCPCYLAVRECDPDLCLTCGAADHWDSKNVSCKNCSIQRGSKKHLLLAPSDVAGWGIFIKDPVQKNEFISEYCGEIISQDEADRRGKVYDKYMCSFLFNLNNDFVVDATRKGNKIRFANHSVNPNCYAKVMMVNGDHRIGIFAKRAIQTGEELFFDYRYSQADALKYVGIEREMEIP

SEQ ID NO: 18 - DNA, 2235 bp, Homo sapiens
ggccagaccggcaagaagagcgagaagggccccgtgtgctggcggaagcgggtgaagagcgagtacatgcggctgcggcagctgaagcggttccggcgggccgacgaggtgaagagcatgttcagcagcaaccggcagaagatcctggagcggaccgagatcctgaaccaggagtggaagcagcggcgaatccagcccgtgcacatcctgaccagcgtgagcagcctgcggggcacccgggagtgcagcgtgaccagcgacctggacttccccacccaggtgatccccctaaagaccctgaacgccgtggccagcgtgcccatcatgtacagctggagccccctgcagcagaacttcatggtggaggacgagaccgtgctgcacaacatcccctacatgggcgacgaggtgctggaccaggacggcaccttcatcgaggagctgatcaagaactacgacggcaaggtgcacggcgaccgggagtgcggcttcatcaacgacgagatcttcgtggagctggtgaacgccctgggccagtacaacgacgacgacgacgacgacgacggcgacgaccccgaggagcgggaggagaagcagaaggacctggaggaccaccgggacgacaaggagagccggcccccccggaagttccccagcgacaagatcttcgaggccatcagcagcatgttccccgacaagggcaccgccgaggagctgaaggagaagtacaaggagctgaccgagcagcagctgcccggcgccctgccccccgagtgcacccccaacatcgacggccccaacgccaagagcgtgcagcgggagcagagcctgcacagcttccacaccctgttctgccggcggtgcttcaagtacgactgcttcctgcaccccttccacgccacccccaacacctacaagcggaagaacaccgagaccgccctggacaacaagccctgcggcccccagtgctaccagcacctggagggcgccaaggagttcgccgccgccctgaccgccgagcggatcaagaccccccccaagcggcccggcggccggcggcggggccggctgcccaacaacagcagccggcccagcacccccaccatcaacgtgctggagagcaaggacaccgacagcgaccgggaggccggcaccgagaccggcggcgagaacaacgacaaggaggaggaggagaagaaggacgagaccagcagcagcagcgaggccaacagccggtgccagacccccatcaagatgaagcccaacatcgagccccccgagaacgtggagtggagcggcgccgaggccagcatgttccgggtgctgatcggcacctactacgacaacttctgcgccatcgcccggctgatcggcaccaagacctgccggcaggtgtacgagttccgggtgaaggagagcagcatcatcgcccccgcccccgccgaggacgtggacacccccccccggaagaagaagcggaagcaccggctgtgggccgcccactgccggaagatccagctgaagaaggacggcagcagcaaccacgtgtacaactaccagccctgcgaccacccccggcagccctgcgacagcagctgcccctgcgtgatcgcccagaacttctgcgagaagttctgccagtgcagcagcgagtgccagaaccggttccccggctgccggtgcaaggcccagtgcaacaccaagcagtgcccctgctacctggccgtgcgggagtgcgaccccgacctgtgcctgacctgcggcgccgccgaccactgggacagcaagaacgtgagctgcaagaactgcagcatccagcggggcagcaagaagcacctgctgctggcccccagcgacgtggccggctggggcatcttcatcaaggaccccgtgcagaagaacgagttcatcagcgagtactgcggcgagatcatcagccaggacgaggccgaccggcggggcaaggtgtacgacaagtacatgtgcagcttcctgttcaacctgaacaacgacttcgtggtggacgccacccggaagggcaacaagatccggttcgccaaccacagcgtgaaccccaactgctacgccaaggtgatgatggtgaacggcgaccaccggatcggcatcttcgccaagcgggccatccagaccggcgaggagctgttcttcgactaccggtacagccaggccgacgccctgaagtacgtgggcatcgagcgggagatggagatcccc

SEQ ID NO: 19 - protein, 376 aa, Homo sapiens
EEPEEPADSGQSLVPVYIYSPEYVSMCDSLAKIPKRASMVHSLIEAYALHKQMRIVKPKVASMEEMATFHTDAYLQHLQKVSQEGDDDHPDSIEYGLGYDCPATEGIFDYAAAIGGATITAAQCLIDGMCKVAINWSGGWHHAKKDEASGFCYLNDAVLGILRLRRKFERILYVDLDLHHGDGVEDAFSFTSKVMTVSLHKFSPGFFPGTGDVSDVGLGKGRYYSVNVPIQDGIQDEKYYQICESVLKEVYQAFNPKAVVLQLGADTIAGDPMCSFNMTPVGIGKCLKYILQWQLATLILGGGGYNLANTARCWTYLTGVILGKTLSSEIPDHEFFTAYGPDYVLEITPSCRPDRNEPHRIQQILNYIKGNLKHVV

SEQ ID NO: 20 - DNA, 20 bp, Artificial Sequence
  Description of Artificial Sequence: Synthetic oligonucleotide
ggggccactagggacaggat

SEQ ID NO: 21 - DNA, 20 bp, Artificial Sequence
  Description of Artificial Sequence: Synthetic oligonucleotide
agccccaccttgtggtcaga

SEQ ID NO: 22 - DNA, 20 bp, Artificial Sequence
  Description of Artificial Sequence: Synthetic oligonucleotide
agtgctgccttctgaccaca

SEQ ID NO: 23 - DNA, 20 bp, Artificial Sequence
  Description of Artificial Sequence: Synthetic oligonucleotide
gctgccttctgaccacaagg

SEQ ID NO: 24 - DNA, 20 bp, Artificial Sequence
  Description of Artificial Sequence: Synthetic oligonucleotide
ccagtataagccccaccttg

SEQ ID NO: 25 - DNA, 20 bp, Artificial Sequence
  Description of Artificial Sequence: Synthetic oligonucleotide
ctgcctgtcccataaggagg

SEQ ID NO: 26 - DNA, 20 bp, Artificial Sequence
  Description of Artificial Sequence: Synthetic oligonucleotide
gcactgcctgtcccataagg

SEQ ID NO: 27 - DNA, 20 bp, Artificial Sequence
  Description of Artificial Sequence: Synthetic oligonucleotide
ggtcctcctccttatgggac

SEQ ID NO: 28 - DNA, 20 bp, Artificial Sequence
  Description of Artificial Sequence: Synthetic oligonucleotide
gccttgttttcggctctaga

SEQ ID NO: 29 - DNA, 20 bp, Artificial Sequence
  Description of Artificial Sequence: Synthetic oligonucleotide
gccatctagagccgaaaaca

SEQ ID NO: 30 - DNA, 20 bp, Artificial Sequence
  Description of Artificial Sequence: Synthetic oligonucleotide
ccaatgaagatgaaactggg

SEQ ID NO: 31 - DNA, 20 bp, Artificial Sequence
  Description of Artificial Sequence: Synthetic oligonucleotide
aacgtgcttgcctaagattc

SEQ ID NO: 32 - DNA, 20 bp, Artificial Sequence
  Description of Artificial Sequence: Synthetic oligonucleotide
agcccttaatcatatctagt

SEQ ID NO: 33 - DNA, 20 bp, Artificial Sequence
  Description of Artificial Sequence: Synthetic oligonucleotide
cagagcttaagacctgtact

SEQ ID NO: 34 - DNA, 20 bp, Artificial Sequence
  Description of Artificial Sequence: Synthetic oligonucleotide
gcccaccttgaccttcacaa

SEQ ID NO: 35 - DNA, 20 bp, Artificial Sequence
  Description of Artificial Sequence: Synthetic oligonucleotide
gttactgcgtaattaccagg

SEQ ID NO: 36 - DNA, 20 bp, Artificial Sequence
  Description of Artificial Sequence: Synthetic oligonucleotide
tattacatcctacctataag

SEQ ID NO: 37 - DNA, 20 bp, Artificial Sequence
  Description of Artificial Sequence: Synthetic oligonucleotide
tgggctctggacttagatcg

SEQ ID NO: 38 - DNA, 20 bp, Artificial Sequence
  Description of Artificial Sequence: Synthetic oligonucleotide
taagtgggctatgtatacac

SEQ ID NO: 39 - DNA, 20 bp, Artificial Sequence
  Description of Artificial Sequence: Synthetic oligonucleotide
tttctaagtctgtcacaagg

SEQ ID NO: 40 - DNA, 20 bp, Artificial Sequence
  Description of Artificial Sequence: Synthetic oligonucleotide
aaagtaatatgatctaggaa

SEQ ID NO: 41 - DNA, 20 bp, Artificial Sequence
  Description of Artificial Sequence: Synthetic oligonucleotide
gttcgagcggctgtgcgagg

SEQ ID NO: 42 - DNA, 20 bp, Artificial Sequence
  Description of Artificial Sequence: Synthetic oligonucleotide
gctctgtggctctccgagaa

SEQ ID NO: 43 - DNA, 20 bp, Artificial Sequence
  Description of Artificial Sequence: Synthetic oligonucleotide
gtgtgtgtgtttcaacgtag

SEQ ID NO: 44 - DNA, 20 bp, Artificial Sequence
  Description of Artificial Sequence: Synthetic oligonucleotide
ggaagtcactgggagctgcg

SEQ ID NO: 45 - DNA, 20 bp, Artificial Sequence
  Description of Artificial Sequence: Synthetic oligonucleotide
ggccacgggtgtgttcccag

SEQ ID NO: 46 - DNA, 20 bp, Artificial Sequence
  Description of Artificial Sequence: Synthetic oligonucleotide
atggccatttgcaaaagtca

SEQ ID NO: 47 - DNA, 20 bp, Artificial Sequence
  Description of Artificial Sequence: Synthetic oligonucleotide
ccaaactagacagataaagc

SEQ ID NO: 48 - DNA, 20 bp, Artificial Sequence
  Description of Artificial Sequence: Synthetic oligonucleotide
ccagcatgactctagcatgc

SEQ ID NO: 49 - DNA, 20 bp, Artificial Sequence
  Description of Artificial Sequence: Synthetic oligonucleotide
tggccaaggtctgatatgca

SEQ ID NO: 50 - DNA, 20 bp, Artificial Sequence
  Description of Artificial Sequence: Synthetic oligonucleotide
tcatgagtcccagaacatgt

SEQ ID NO: 51 - DNA, 20 bp, Artificial Sequence
  Description of Artificial Sequence: Synthetic oligonucleotide
gcgaaagaagtagtagctaa

SEQ ID NO: 52 - DNA, 20 bp, Artificial Sequence
  Description of Artificial Sequence: Synthetic oligonucleotide
gactaagactggcaaatctg

SEQ ID NO: 53 - DNA, 20 bp, Artificial Sequence
  Description of Artificial Sequence: Synthetic oligonucleotide
gactaagaggagccgacatg

SEQ ID NO: 54 - DNA, 20 bp, Artificial Sequence
  Description of Artificial Sequence: Synthetic oligonucleotide
gaaaaacgggtgttgtgacg

SEQ ID NO: 55 - DNA, 20 bp, Artificial Sequence
  Description of Artificial Sequence: Synthetic oligonucleotide
tttgtgaactaaggattctg

SEQ ID NO: 56 - DNA, 20 bp, Artificial Sequence
  Description of Artificial Sequence: Synthetic oligonucleotide
gtccgtgtagagttaccatg

SEQ ID NO: 57 - DNA, 20 bp, Artificial Sequence
  Description of Artificial Sequence: Synthetic oligonucleotide
gatgtattcacaagaggact

SEQ ID NO: 58 - DNA, 20 bp, Artificial Sequence
  Description of Artificial Sequence: Synthetic oligonucleotide
aattactacctcatagctag

SEQ ID NO: 59 - DNA, 20 bp, Artificial Sequence
  Description of Artificial Sequence: Synthetic oligonucleotide
gaaggtagaaatccgccact

SEQ ID NO: 60 - DNA, 20 bp, Artificial Sequence
  Description of Artificial Sequence: Synthetic oligonucleotide
gaaacgccgaggtaactcat

SEQ ID NO: 61 - DNA, 20 bp, Artificial Sequence
  Description of Artificial Sequence: Synthetic oligonucleotide
caactaaaatttctagccct

SEQ ID NO: 62 - DNA, 21 bp, Artificial Sequence
  Description of Artificial Sequence: Synthetic oligonucleotide
gactccagtctttctagaaga

SEQ ID NO: 63 - protein, 6 aa, Artificial Sequence
  Description of Artificial Sequence: Synthetic peptide
PKKKRK

SEQ ID NO: 64 - protein, 15 aa, Artificial Sequence
  Description of Artificial Sequence: Synthetic peptide
KRPAATKKAGQAKKK

SEQ ID NO: 65 - protein, 9 aa, Artificial Sequence
  Description of Artificial Sequence: Synthetic peptide
YPYDVPDYA

SEQ ID NO: 66 - DNA, 1128 bp, Homo sapiens
gaggagcccgaggagcccgccgatagcggacaatctctggtgcccgtctacatctacagccccgaatatgtgagcatgtgtgattccctcgccaagatccctaagagagccagcatggtgcattctctgatcgaggcctacgctctgcataagcaaatgaggatcgtgaagcccaaggtcgccagcatggaagagatggccacctttcacaccgatgcctacctccaacatctccagaaggtgtcccaagagggcgacgacgaccaccccgactccattgagtacggactgggctatgattgccccgccaccgagggcatctttgactatgccgccgctatcggcggagctaccatcacagccgcccagtgtctgattgatggcatgtgcaaggtcgccatcaactggtccggaggctggcatcatgccaagaaggatgaggcctccggcttctgttatctgaatgacgccgtgctgggcattctgagactgaggaggaaattcgagaggattctgtacgtggatctggatctgcatcacggagatggagtcgaagatgccttcagcttcaccagcaaggtgatgacagtctctctgcacaagttctcccccggcttctttcccggaaccggcgacgtgtccgacgtgggactgggcaagggaaggtactacagcgtgaacgtgcccattcaagacggcatccaagacgagaagtactaccagatctgcgagtccgtgctcaaggaggtctaccaagccttcaatcctaaggctgtcgtgctccaactgggagctgataccattgctggcgatcccatgtgcagcttcaatatgacacccgtcggaatcggcaagtgcctcaagtacatcctccagtggcagctcgccaccctcattctcggaggaggcggatacaatctggctaataccgccagatgctggacctatctgaccggcgtgattctgggcaaaacactgagcagcgaaatccccgaccacgagtttttcaccgcttacggccccgactacgtgctggagatcacccccagctgcagacccgatagaaacgaaccccatagaatccagcaaattctgaactatatcaagggcaacctcaagcacgtcgtg

SEQ ID NO: 67 - protein, 282 aa, Homo sapiens
GNRAIRTEKIICRDVARGYENVPIPCVNGVDGEPCPEDYKYISENCETSTMNIDRNITHLQHCTCVDDCSSSNCLCGQLSIRCWYDKDGRLLQEFNKIEPPLIFECNQACSCWRNCKNRVVQSGIKVRLQLYRTAKMGWGVRALQTIPQGTFICEYVGELISDAEADVREDDSYLFDLDNKDGEVYCIDARYYGNISRFINHLCDPNIIPVRVFMLHQDLRFPRIAFFSSRDIRTGEELGFDYGDRFWDIKSKYFTCQCGSEKCKHSAEAIALEQSRLARLD

SEQ ID NO: 68 - DNA, 846 bp, Homo sapiens
ggaaatagggctatcagaaccgagaagatcatctgtagggacgtggctagaggctacgagaacgtgcccattccttgcgtgaatggcgtggatggcgaaccttgccccgaggactacaaatacatctccgagaactgcgaaaccagcacaatgaacatcgacagaaacatcacccacctccagcactgcacatgtgtggatgactgctcctccagcaactgtctgtgcggccagctctccatcagatgctggtacgacaaggacggcagactgctgcaagagttcaacaagatcgaaccccctctcatcttcgagtgtaaccaagcttgcagctgctggagaaactgcaagaatagagtggtccagagcggcatcaaggtgagactgcaactgtacagaaccgccaagatgggatggggagtgagggctctgcaaaccattccccaaggcaccttcatctgcgaatacgtgggcgaactgatctccgacgccgaagctgacgtgagagaggacgacagctatctcttcgatctggacaataaggacggcgaggtgtactgcatcgacgctagatattacggcaacatctctagattcatcaaccacctctgcgatcccaacatcattcccgtgagggtgttcatgctgcaccaagatctgaggttccctagaatcgccttcttcagctctagagacatcagaaccggcgaggagctgggcttcgattacggcgatagattctgggacatcaagtccaagtacttcacatgccagtgcggcagcgagaagtgtaagcacagcgctgaggccattgctctggagcagtctagactggccagactggat

SEQ ID NO: 69 - DNA, 7987 bp, Artificial Sequence
  Description of Artificial Sequence: Synthetic polynucleotide
aggaaataagagagaaaagaagagtaagaagaaatataagagccaccatggcccccaagaagaagcggaaggtgggcatccacggcgtgcccgccgcctcgggcgggggtggctcaggaagcgccgctatcgccgaagtgctgctgaatgccagatgcgatctgcatgccgtgaactaccacggcgacacccctctgcatatcgccgctagagagagctaccatgactgtgtgctgctgtttctgagcagaggcgccaatcccgagctcagaaacaaagagggcgacaccgcttgggatctgacacccgagagatccgacgtgtggttcgctctgcaactgaatagaaaactgagactgggcgtcggcaatagggccattagaaccgagaagatcatctgtagggacgtggctaggggctacgagaacgtgcccatcccttgtgtgaacggagtggatggagagccttgccccgaggattacaaatacatcagcgagaactgcgaaacctccaccatgaatatcgatagaaacattacacacctccagcactgtacatgcgtggacgattgcagcagcagcaactgtctgtgcggccaactgagcatcagatgctggtacgacaaggatggcagactgctgcaagagttcaacaagatcgaaccccctctgatcttcgagtgtaaccaagcttgcagctgttggaggaactgcaagaatagggtcgtgcagtccggaatcaaggtgagactgcagctgtatagaacagctaagatgggatggggagtcagagctctgcagaccatcccccaaggcacattcatctgtgagtacgtcggcgaactcatcagcgacgctgaggccgatgtgagggaggacgacagctatctcttcgacctcgacaacaaggacggcgaggtgtactgcatcgacgctagatattacggcaacatcagcagattcatcaaccacctctgcgaccccaatatcatccccgtgagagtgttcatgctccatcaagatctgagattccctaggatcgccttcttcagctctagagacattagaaccggcgaggagctgggattcgactacggcgacaggttctgggacatcaagagcaagtacttcacatgccaatgcggcagcgagaaatgcaagcatagcgccgaggccattgctctggagcagtctagactggctaggctggaccctcaccccgagctgctgcccgaactgggatctctgcctcccgtgaataccggaggtggcggatcgggagacaagaagtacagcatcggcctggccatcggcaccaacagcgtgggctgggccgtgatcaccgacgagtacaaggtgcccagcaagaagttcaaggtgctgggcaacaccgaccggcacagcatcaagaagaacctgatcggcgccctgctgttcgacagcggcgagaccgccgaggccacccggctgaagcggaccgcccggcggcggtacacccggcggaagaaccggatctgctacctgcaggagatcttcagcaacgagatggccaaggtggacgacagcttcttccaccggctggaggagagcttcctggtggaggaggacaagaagcacgagcggcaccccatcttcggcaacatcgtggacgaggtggcctaccacgagaagtaccccaccatctaccacctgcggaagaagctggtggacagcaccgacaaggccgacctgcggctgatctacctggccctggcccacatgatcaagttccggggccacttcctgatcgagggcgacctgaaccccgacaacagcgacgtggacaagctgttcatccagctggtgcagacctacaaccagctgttcgaggagaaccccatcaacgccagcggcgtggacgccaaggccatcctgagcgcccggctgagcaagagccggcggctggagaacctgatcgcccagctgcccggcgagaagaagaacggcctgttcggcaacctgatcgccctgagcctgggcctgacccccaacttcaagagcaacttcgacctggccgaggacgccaagctgcagctgagcaaggacacctacgacgacgacctggacaacctgctggcccagatcggcgaccagtacgccgacctgttcctggccgccaagaacctgagcgacgccatcctgctgagcgacatcctgcgggtgaacaccgagatcaccaaggcccccctgagcgccagcatgatcaagcggtacgacgagcaccaccaggacctgaccctgctgaaggccctggtgcggcagcagctgcccgagaagtacaaggagatcttcttcgaccagagcaagaacggctacgccggctacatcgacggcggcgccagccaggaggagttctacaagttcatcaagcccatcctggagaagatggacggcaccgaggagctgctggtgaagctgaaccgggaggacctgctgcggaagcagcggaccttcgacaacggcagcatcccccaccagatccacctgggcgagctgcacgccatcctgcggcggcaggaggacttctaccccttcctgaaggacaaccgggagaagatcgagaagatcctgaccttccggatcccctactacgtgggccccctggcccggggcaacagccggttcgcctggatgacccggaaatccgaggagaccatcaccccctggaacttcgaggaggtggtggacaagggcgccagcgcccagagcttcatcgagcggatgaccaacttcgacaagaacctgcccaacgagaaggtgctgcccaagcacagcctgctgtacgagtacttcaccgtgtacaacgagctgaccaaggtgaagtacgtgaccgagggcatgcggaagcccgccttcctgagcggcgagcagaagaaggccatcgtggacctgctgttcaagaccaaccggaaggtgaccgtgaagcagctgaaggaggactacttcaagaagatcgagtgcttcgacagcgtggagatcagcggcgtggaggaccggttcaacgccagcctgggcacctaccacgacctgctgaagatcatcaaggacaaggacttcctggacaacgaggagaacgaggacatcctggaggacatcgtgctgaccctgaccctgttcgaggaccgggagatgatcgaggagcggctgaaaacctacgcccacctgttcgacgacaaggtgatgaagcagctgaagcggcggcggtacaccggctggggccggctgagccggaagctgatcaacggcatccgggacaagcagagcggcaagaccatcctggacttcctgaaatccgacggcttcgccaaccggaacttcatgcagctgatccacgacgacagcctgaccttcaaggaggacatccagaaggcccaggtgagcggccagggcgacagcctgcacgagcacatcgccaacctggccggcagccccgccatcaagaagggcatcctgcagaccgtgaaggtggtggacgagctggtgaaggtgatgggccggcacaagcccgagaacatcgtgatcgagatggcccgggagaaccagaccacccagaagggccagaagaacagccgggagcggatgaagcggatcgaggagggcatcaaggagctgggcagccagatcctgaaggagcaccccgtggagaacacccagctgcagaacgagaagctgtacctgtactacctgcagaacggccgggacatgtacgtggaccaggagctggacatcaaccggctgagcgactacgacgtggccgccatcgtgccccagagcttcctgaaggacgacagcatcgacaacaaggtgctgacccggagcgacaaggcccggggcaagagcgacaacgtgcccagcgaggaggtggtgaagaagatgaagaactactggcggcagctgctgaacgccaagctgatcacccagcggaagttcgacaacctgaccaaggccgagcggggcggcctgagcgagctggacaaggccggcttcatcaagcggcagctggtggagacccggcagatcaccaagcacgtggcccagatcctggacagccggatgaacaccaagtacgacgagaacgacaagctgatccgggaggtgaaggtgatcaccctgaaatccaagctggtgagcgacttccggaaggacttccagttctacaaggtgcgggagatcaacaactaccaccacgcccacgacgcctacctgaacgccgtggtgggcaccgccctgatcaagaagtaccccaagctggagagcgagttcgtgtacggcgactacaaggtgtacgacgtgcggaagatgatcgccaagagcgagcaggagatcggcaaggccaccgccaagtacttcttctacagcaacatcatgaacttcttcaagaccgagatcaccctggccaacggcgagatccggaagcggcccctgatcgagaccaacggcgagaccggcgagatcgtgtgggacaagggccgggacttcgccaccgtgcggaaggtgctgagcatgccccaggtgaacatcgtgaagaaaaccgaggtgcagaccggcggcttcagcaaggagagcatcctgcccaagcggaacagcgacaagctgatcgcccggaagaaggactgggaccccaagaagtacggcggcttcgacagccccaccgtggcctacagcgtgctggtggtggccaaggtggagaagggcaagagcaagaagctgaaatccgtgaaggagctgctgggcatcaccatcatggagcggagcagcttcgagaagaaccccatcgacttcctggaggccaagggctacaaggaggtgaagaaggacctgatcatcaagctgcccaagtacagcctgttcgagctggagaacggccggaagcggatgctggccagcgccggcgagctgcagaagggcaacgagctggccctgcccagcaagtacgtgaacttcctgtacctggccagccactacgagaagctgaagggcagccccgaggacaacgagcagaagcagctgttcgtggagcagcacaagcactacctggacgagatcatcgagcagatcagcgagttcagcaagcgggtgatcctggccgacgccaacctggacaaggtgctgagcgcctacaacaagcaccgggacaagcccatccgggagcaggccgagaacatcatccacctgttcaccctgaccaacctgggcgcccccgccgccttcaagtacttcgacaccaccatcgaccggaagcggtacaccagcaccaaggaggtgctggacgccaccctgatccaccagagcatcaccggcctgtacgagacccggatcgacctgagccagctgggcggcgacagcggcggcaagcggcccgccgccaccaagaaggccggccaggccaagaagaagaagtcgggcgggggtggctcaggacagaccggcaaaaagtccgaaaagggccccgtgtgctggaggaagagggtcaagagcgagtacatgaggctgagacagctcaagagatttaggagagccgatgaggtgaagtccatgttctccagcaacagacaaaagattctggagaggaccgagatcctcaaccaagagtggaagcagagaagaatccagcccgtgcacattctgacctccgtgagctctctgaggggcacaagagaatgctccgtcaccagcgatctggacttccccacacaagtgatccccctcaagacactgaacgctgtggccagcgtgcccatcatgtatagctggtcccctctgcaacagaacttcatggtggaggacgagacagtgctgcacaatatcccctacatgggagatgaggtgctggaccaagacggcacctttattgaggagctgattaaaaactacgatggcaaggtgcacggcgatagggagtgtggcttcatcaacgacgagatcttcgtcgagctggtgaatgctctgggccagtataatgacgatgatgacgacgatgacggcgacgaccccgaagagagagaggagaagcaaaaggatctggaggaccatagggacgacaaagagtctagacctcctagaaagttcccctccgacaagatcttcgaagccatctcctccatgttccccgacaagggcacagccgaggaactgaaggagaagtataaggaactcacagagcaacagctgcccggagctctgcctcccgagtgcacccctaacatcgacggccccaacgccaagagcgtgcagagggagcaatccctccacagcttccataccctcttctgcagaagatgctttaaatacgattgctttctccatcctttccacgccacacccaacacctacaagaggaagaacaccgaaaccgctctggacaataaaccttgcggaccccagtgctaccagcatctggaaggagccaaggaatttgccgctgctctgacagccgagagaattaaaacccctcccaaaagacccggcggcagaaggaggggcagactgcctaataacagcagcagacccagcacccctaccattaacgtgctggaatccaaggacaccgacagcgatagagaggccggcacagaaaccggcggagagaacaacgacaaggaggaggaggagaagaaagacgagacatcctccagcagcgaggctaatagcagatgccagacccctatcaagatgaaacctaatatcgagccccccgagaatgtggagtggagcggcgctgaggcctccatgtttagagtgctgatcggaacctactacgacaacttctgcgctatcgctagactgattggcaccaagacatgcagacaagtgtacgagttcagagtcaaggagagctccattatcgcccccgcccccgccgaagatgtggacaccccccccagaaagaagaaaaggaagcatagactgtgggccgcccactgtagaaagatccagctcaaaaaggacggcagcagcaaccacgtgtacaactatcagccttgtgaccaccccagacaaccttgtgattccagctgcccttgcgtgatcgcccagaacttctgcgagaagttctgtcagtgcagcagcgagtgccaaaatagatttcccggatgtaggtgcaaagcccagtgcaataccaagcagtgcccttgctatctggccgtgagagagtgcgatcccgatctgtgtctgacatgtggagctgccgaccattgggacagcaagaatgtgagctgcaagaactgcagcatccaaaggggaagcaaaaaacatctgctgctcgccccttccgatgtggccggatggggaatctttatcaaggaccccgtccagaaaaacgagttcatttccgagtattgcggcgagatcatcagccaagacgaagctgatagaagaggcaaagtgtatgacaaatacatgtgctccttcctcttcaacctcaataatgatttcgtggtggacgccacaaggaagggcaacaagattagattcgccaaccacagcgtcaatcctaactgctatgccaaggtcatgatggtcaacggcgaccacagaattggcatcttcgctaagagggccatccagaccggcgaggaactgttcttcgactatagatactcccaagccgacgctctgaagtacgtgggcatcgagagagagatggaaatccccggaggtggcggatcgggaaagcggcccgccgccaccaagaaggccggtcaggccaagaagaagaagggcagctacccctacgacgtgcccgactacgcctgagcggccgcttaattaagctgccttctgcggggcttgccttctggccatgcccttcttctctcccttgcacctgtacctcttggtctttgaataaagcctgagtaggaagtctagaaaaaaaaaaaaaaaaaaaaaaaaaaaaaaaaaaaaaaaaaaaaaaaaaaaaaaaaaaaaaaaaaaaaaaaaaaaaaaaa

SEQ ID NO: 70 - protein, 2581 aa, Artificial Sequence
  Description of Artificial Sequence: Synthetic polypeptide
MAPKKKRKVGIHGVPAASGGGGSGSAAIAEVLLNARCDLHAVNYHGDTPLHIAARESYHDCVLLFLSRGANPELRNKEGDTAWDLTPERSDVWFALQLNRKLRLGVGNRAIRTEKIICRDVARGYENVPIPCVNGVDGEPCPEDYKYISENCETSTMNIDRNITHLQHCTCVDDCSSSNCLCGQLSIRCWYDKDGRLLQEFNKIEPPLIFECNQACSCWRNCKNRVVQSGIKVRLQLYRTAKMGWGVRALQTIPQGTFICEYVGELISDAEADVREDDSYLFDLDNKDGEVYCIDARYYGNISRFINHLCDPNIIPVRVFMLHQDLRFPRIAFFSSRDIRTGEELGFDYGDRFWDIKSKYFTCQCGSEKCKHSAEAIALEQSRLARLDPHPELLPELGSLPPVNTGGGGSGDKKYSIGLAIGTNSVGWAVITDEYKVPSKKFKVLGNTDRHSIKKNLIGALLFDSGETAEATRLKRTARRRYTRRKNRICYLQEIFSNEMAKVDDSFFHRLEESFLVEEDKKHERHPIFGNIVDEVAYHEKYPTIYHLRKKLVDSTDKADLRLIYLALAHMIKFRGHFLIEGDLNPDNSDVDKLFIQLVQTYNQLFEENPINASGVDAKAILSARLSKSRRLENLIAQLPGEKKNGLFGNLIALSLGLTPNFKSNFDLAEDAKLQLSKDTYDDDLDNLLAQIGDQYADLFLAAKNLSDAILLSDILRVNTEITKAPLSASMIKRYDEHHQDLTLLKALVRQQLPEKYKEIFFDQSKNGYAGYIDGGASQEEFYKFIKPILEKMDGTEELLVKLNREDLLRKQRTFDNGSIPHQIHLGELHAILRRQEDFYPFLKDNREKIEKILTFRIPYYVGPLARGNSRFAWMTRKSEETITPWNFEEVVDKGASAQSFIERMTNFDKNLPNEKVLPKHSLLYEYFTVYNELTKVKYVTEGMRKPAFLSGEQKKAIVDLLFKTNRKVTVKQLKEDYFKKIECFDSVEISGVEDRFNASLGTYHDLLKIIKDKDFLDNEENEDILEDIVLTLTLFEDREMIEERLKTYAHLFDDKVMKQLKRRRYTGWGRLSRKLINGIRDKQSGKTILDFLKSDGFANRNFMQLIHDDSLTFKEDIQKAQVSGQGDSLHEHIANLAGSPAIKKGILQTVKVVDELVKVMGRHKPENIVIEMARENQTTQKGQKNSRERMKRIEEGIKELGSQILKEHPVENTQLQNEKLYLYYLQNGRDMYVDQELDINRLSDYDVAAIVPQSFLKDDSIDNKVLTRSDKARGKSDNVPSEEVVKKMKNYWRQLLNAKLITQRKFDNLTKAERGGLSELDKAGFIKRQLVETRQITKHVAQILDSRMNTKYDENDKLIREVKVITLKSKLVSDFRKDFQFYKVREINNYHHAHDAYLNAVVGTALIKKYPKLESEFVYGDYKVYDVRKMIAKSEQEIGKATAKYFFYSNIMNFFKTEITLANGEIRKRPLIETNGETGEIVWDKGRDFATVRKVLSMPQVNIVKKTEVQTGGFSKESILPKRNSDKLIARKKDWDPKKYGGFDSPTVAYSVLVVAKVEKGKSKKLKSVKELLGITIMERSSFEKNPIDFLEAKGYKEVKKDLIIKLPKYSLFELENGRKRMLASAGELQKGNELALPSKYVNFLYLASHYEKLKGSPEDNEQKQLFVEQHKHYLDEIIEQISEFSKRVILADANLDKVLSAYNKHRDKPIREQAENIIHLFTLTNLGAPAAFKYFDTTIDRKRYTSTKEVLDATLIHQSITGLYETRIDLSQLGGDSGGKRPAATKKAGQAKKKKSGGGGSGQTGKKSEKGPVCWRKRVKSEYMRLRQLKRFRRADEVKSMFSSNRQKILERTEILNQEWKQRRIQPVHILTSVSSLRGTRECSVTSDLDFPTQVIPLKTLNAVASVPIMYSWSPLQQNFMVEDETVLHNIPYMGDEVLDQDGTFIEELIKNYDGKVHGDRECGFINDEIFVELVNALGQYNDDDDDDDGDDPEEREEKQKDLEDHRDDKESRPPRKFPSDKIFEAISSMFPDKGTAEELKEKYKELTEQQLPGALPPECTPNIDGPNAKSVQREQSLHSFHTLFCRRCFKYDCFLHPFHATPNTYKRKNTETALDNKPCGPQCYQHLEGAKEFAAALTAERIKTPPKRPGGRRRGRLPNNSSRPSTPTINVLESKDTDSDREAGTETGGENNDKEEEEKKDETSSSSEANSRCQTPIKMKPNIEPPENVEWSGAEASMFRVLIGTYYDNFCAIARLIGTKTCRQVYEFRVKESSIIAPAPAEDVDTPPRKKKRKHRLWAAHCRKIQLKKDGSSNHVYNYQPCDHPRQPCDSSCPCVIAQNFCEKFCQCSSECQNRFPGCRCKAQCNTKQCPCYLAVRECDPDLCLTCGAADHWDSKNVSCKNCSIQRGSKKHLLLAPSDVAGWGIFIKDPVQKNEFISEYCGEIISQDEADRRGKVYDKYMCSFLFNLNNDFVVDATRKGNKIRFANHSVNPNCYAKVMMVNGDHRIGIFAKRAIQTGEELFFDYRYSQADALKYVGIEREMEIPGGGGSGKRPAATKKAGQAKKKKGSYPYDVPDYA

SEQ ID NO: 71 - DNA, 6040 bp, Artificial Sequence
  Description of Artificial Sequence: Synthetic polynucleotide
aggaaataagagagaaaagaagagtaagaagaaatataagagccaccatggcccccaagaagaagcggaaggtgggcatccacggcgtgcccgccgcctcgggcgggggtggctcaggaagcgccgctatcgccgaagtgctgctgaatgccagatgcgatctgcatgccgtgaactaccacggcgacacccctctgcatatcgccgctagagagagctaccatgactgtgtgctgctgtttctgagcagaggcgccaatcccgagctcagaaacaaagagggcgacaccgcttgggatctgacacccgagagatccgacgtgtggttcgctctgcaactgaatagaaaactgagactgggcgtcggcaatagggccattagaaccgagaagatcatctgtagggacgtggctaggggctacgagaacgtgcccatcccttgtgtgaacggagtggatggagagccttgccccgaggattacaaatacatcagcgagaactgcgaaacctccaccatgaatatcgatagaaacattacacacctccagcactgtacatgcgtggacgattgcagcagcagcaactgtctgtgcggccaactgagcatcagatgctggtacgacaaggatggcagactgctgcaagagttcaacaagatcgaaccccctctgatcttcgagtgtaaccaagcttgcagctgttggaggaactgcaagaatagggtcgtgcagtccggaatcaaggtgagactgcagctgtatagaacagctaagatgggatggggagtcagagctctgcagaccatcccccaaggcacattcatctgtgagtacgtcggcgaactcatcagcgacgctgaggccgatgtgagggaggacgacagctatctcttcgacctcgacaacaaggacggcgaggtgtactgcatcgacgctagatattacggcaacatcagcagattcatcaaccacctctgcgaccccaatatcatccccgtgagagtgttcatgctccatcaagatctgagattccctaggatcgccttcttcagctctagagacattagaaccggcgaggagctgggattcgactacggcgacaggttctgggacatcaagagcaagtacttcacatgccaatgcggcagcgagaaatgcaagcatagcgccgaggccattgctctggagcagtctagactggctaggctggaccctcaccccgagctgctgcccgaactgggatctctgcctcccgtgaataccggaggtggcggatcgggagacaagaagtacagcatcggcctggccatcggcaccaacagcgtgggctgggccgtgatcaccgacgagtacaaggtgcccagcaagaagttcaaggtgctgggcaacaccgaccggcacagcatcaagaagaacctgatcggcgccctgctgttcgacagcggcgagaccgccgaggccacccggctgaagcggaccgcccggcggcggtacacccggcggaagaaccggatctgctacctgcaggagatcttcagcaacgagatggccaaggtggacgacagcttcttccaccggctggaggagagcttcctggtggaggaggacaagaagcacgagcggcaccccatcttcggcaacatcgtggacgaggtggcctaccacgagaagtaccccaccatctaccacctgcggaagaagctggtggacagcaccgacaaggccgacctgcggctgatctacctggccctggcccacatgatcaagttccggggccacttcctgatcgagggcgacctgaaccccgacaacagcgacgtggacaagctgttcatccagctggtgcagacctacaaccagctgttcgaggagaaccccatcaacgccagcggcgtggacgccaaggccatcctgagcgcccggctgagcaagagccggcggctggagaacctgatcgcccagctgcccggcgagaagaagaacggcctgttcggcaacctgatcgccctgagcctgggcctgacccccaacttcaagagcaacttcgacctggccgaggacgccaagctgcagctgagcaaggacacctacgacgacgacctggacaacctgctggcccagatcggcgaccagtacgccgacctgttcctggccgccaagaacctgagcgacgccatcctgctgagcgacatcctgcgggtgaacaccgagatcaccaaggcccccctgagcgccagcatgatcaagcggtacgacgagcaccaccaggacctgaccctgctgaaggccctggtgcggcagcagctgcccgagaagtacaaggagatcttcttcgaccagagcaagaacggctacgccggctacatcgacggcggcgccagccaggaggagttctacaagttcatcaagcccatcctggagaagatggacggcaccgaggagctgctggtgaagctgaaccgggaggacctgctgcggaagcagcggaccttcgacaacggcagcatcccccaccagatccacctgggcgagctgcacgccatcctgcggcggcaggaggacttctaccccttcctgaaggacaaccgggagaagatcgagaagatcctgaccttccggatcccctactacgtgggccccctggcccggggcaacagccggttcgcctggatgacccggaaatccgaggagaccatcaccccctggaacttcgaggaggtggtggacaagggcgccagcgcccagagcttcatcgagcggatgaccaacttcgacaagaacctgcccaacgagaaggtgctgcccaagcacagcctgctgtacgagtacttcaccgtgtacaacgagctgaccaaggtgaagtacgtgaccgagggcatgcggaagcccgccttcctgagcggcgagcagaagaaggccatcgtggacctgctgttcaagaccaaccggaaggtgaccgtgaagcagctgaaggaggactacttcaagaagatcgagtgcttcgacagcgtggagatcagcggcgtggaggaccggttcaacgccagcctgggcacctaccacgacctgctgaagatcatcaaggacaaggacttcctggacaacgaggagaacgaggacatcctggaggacatcgtgctgaccctgaccctgttcgaggaccgggagatgatcgaggagcggctgaaaacctacgcccacctgttcgacgacaaggtgatgaagcagctgaagcggcggcggtacaccggctggggccggctgagccggaagctgatcaacggcatccgggacaagcagagcggcaagaccatcctggacttcctgaaatccgacggcttcgccaaccggaacttcatgcagctgatccacgacgacagcctgaccttcaaggaggacatccagaaggcccaggtgagcggccagggcgacagcctgcacgagcacatcgccaacctggccggcagccccgccatcaagaagggcatcctgcagaccgtgaaggtggtggacgagctggtgaaggtgatgggccggcacaagcccgagaacatcgtgatcgagatggcccgggagaaccagaccacccagaagggccagaagaacagccgggagcggatgaagcggatcgaggagggcatcaaggagctgggcagccagatcctgaaggagcaccccgtggagaacacccagctgcagaacgagaagctgtacctgtactacctgcagaacggccgggacatgtacgtggaccaggagctggacatcaaccggctgagcgactacgacgtggccgccatcgtgccccagagcttcctgaaggacgacagcatcgacaacaaggtgctgacccggagcgacaaggcccggggcaagagcgacaacgtgcccagcgaggaggtggtgaagaagatgaagaactactggcggcagctgctgaacgccaagctgatcacccagcggaagttcgacaacctgaccaaggccgagcggggcggcctgagcgagctggacaaggccggcttcatcaagcggcagctggtggagacccggcagatcaccaagcacgtggcccagatcctggacagccggatgaacaccaagtacgacgagaacgacaagctgatccgggaggtgaaggtgatcaccctgaaatccaagctggtgagcgacttccggaaggacttccagttctacaaggtgcgggagatcaacaactaccaccacgcccacgacgcctacctgaacgccgtggtgggcaccgccctgatcaagaagtaccccaagctggagagcgagttcgtgtacggcgactacaaggtgtacgacgtgcggaagatgatcgccaagagcgagcaggagatcggcaaggccaccgccaagtacttcttctacagcaacatcatgaacttcttcaagaccgagatcaccctggccaacggcgagatccggaagcggcccctgatcgagaccaacggcgagaccggcgagatcgtgtgggacaagggccgggacttcgccaccgtgcggaaggtgctgagcatgccccaggtgaacatcgtgaagaaaaccgaggtgcagaccggcggcttcagcaaggagagcatcctgcccaagcggaacagcgacaagctgatcgcccggaagaaggactgggaccccaagaagtacggcggcttcgacagccccaccgtggcctacagcgtgctggtggtggccaaggtggagaagggcaagagcaagaagctgaaatccgtgaaggagctgctgggcatcaccatcatggagcggagcagcttcgagaagaaccccatcgacttcctggaggccaagggctacaaggaggtgaagaaggacctgatcatcaagctgcccaagtacagcctgttcgagctggagaacggccggaagcggatgctggccagcgccggcgagctgcagaagggcaacgagctggccctgcccagcaagtacgtgaacttcctgtacctggccagccactacgagaagctgaagggcagccccgaggacaacgagcagaagcagctgttcgtggagcagcacaagcactacctggacgagatcatcgagcagatcagcgagttcagcaagcgggtgatcctggccgacgccaacctggacaaggtgctgagcgcctacaacaagcaccgggacaagcccatccgggagcaggccgagaacatcatccacctgttcaccctgaccaacctgggcgcccccgccgccttcaagtacttcgacaccaccatcgaccggaagcggtacaccagcaccaaggaggtgctggacgccaccctgatccaccagagcatcaccggcctgtacgagacccggatcgacctgagccagctgggcggcgacagcggcggcaagcggcccgccgccaccaagaaggccggccaggccaagaagaagaagtcgggcgggggtggctcagacgctaagtctctgaccgcttggagcagaacactggtcaccttcaaggacgtgttcgtcgacttcacaagagaggagtggaaactgctggacaccgcccagcagatcctctatagaaacgtcatgctggagaactacaagaatctggtgtctctgggctaccagctgaccaagcccgacgtgattctgaggctggagaagggcgaggagccttggctggtggagagagagatccaccaagaaacccaccccgacagcgaaaccgccttcgagatcaagagcagcgtgggaggtggcggatcgggaaagcggcccgccgccaccaagaaggccggtcaggccaagaagaagaagggcagctacccctacgacgtgcccgactacgcctgagcggccgcttaattaagctgccttctgcggggcttgccttctggccatgcccttcttctctcccttgcacctgtacctcttggtctttgaataaagcctgagtaggaagtctagaaaaaaaaaaaaaaaaaaaaaaaaaaaaaaaaaaaaaaaaaaaaaaaaaaaaaaaaaaaaaaaaaaaaaaaaaaaaaaaa

SEQ ID NO: 72 - protein, 1932 aa, Artificial Sequence
  Description of Artificial Sequence: Synthetic polypeptide
MAPKKKRKVGIHGVPAASGGGGSGSAAIAEVLLNARCDLHAVNYHGDTPLHIAARESYHDCVLLFLSRGANPELRNKEGDTAWDLTPERSDVWFALQLNRKLRLGVGNRAIRTEKIICRDVARGYENVPIPCVNGVDGEPCPEDYKYISENCETSTMNIDRNITHLQHCTCVDDCSSSNCLCGQLSIRCWYDKDGRLLQEFNKIEPPLIFECNQACSCWRNCKNRVVQSGIKVRLQLYRTAKMGWGVRALQTIPQGTFICEYVGELISDAEADVREDDSYLFDLDNKDGEVYCIDARYYGNISRFINHLCDPNIIPVRVFMLHQDLRFPRIAFFSSRDIRTGEELGFDYGDRFWDIKSKYFTCQCGSEKCKHSAEAIALEQSRLARLDPHPELLPELGSLPPVNTGGGGSGDKKYSIGLAIGTNSVGWAVITDEYKVPSKKFKVLGNTDRHSIKKNLIGALLFDSGETAEATRLKRTARRRYTRRKNRICYLQEIFSNEMAKVDDSFFHRLEESFLVEEDKKHERHPIFGNIVDEVAYHEKYPTIYHLRKKLVDSTDKADLRLIYLALAHMIKFRGHFLIEGDLNPDNSDVDKLFIQLVQTYNQLFEENPINASGVDAKAILSARLSKSRRLENLIAQLPGEKKNGLFGNLIALSLGLTPNFKSNFDLAEDAKLQLSKDTYDDDLDNLLAQIGDQYADLFLAAKNLSDAILLSDILRVNTEITKAPLSASMIKRYDEHHQDLTLLKALVRQQLPEKYKEIFFDQSKNGYAGYIDGGASQEEFYKFIKPILEKMDGTEELLVKLNREDLLRKQRTFDNGSIPHQIHLGELHAILRRQEDFYPFLKDNREKIEKILTFRIPYYVGPLARGNSRFAWMTRKSEETITPWNFEEVVDKGASAQSFIERMTNFDKNLPNEKVLPKHSLLYEYFTVYNELTKVKYVTEGMRKPAFLSGEQKKAIVDLLFKTNRKVTVKQLKEDYFKKIECFDSVEISGVEDRFNASLGTYHDLLKIIKDKDFLDNEENEDILEDIVLTLTLFEDREMIEERLKTYAHLFDDKVMKQLKRRRYTGWGRLSRKLINGIRDKQSGKTILDFLKSDGFANRNFMQLIHDDSLTFKEDIQKAQVSGQGDSLHEHIANLAGSPAIKKGILQTVKVVDELVKVMGRHKPENIVIEMARENQTTQKGQKNSRERMKRIEEGIKELGSQILKEHPVENTQLQNEKLYLYYLQNGRDMYVDQELDINRLSDYDVAAIVPQSFLKDDSIDNKVLTRSDKARGKSDNVPSEEVVKKMKNYWRQLLNAKLITQRKFDNLTKAERGGLSELDKAGFIKRQLVETRQITKHVAQILDSRMNTKYDENDKLIREVKVITLKSKLVSDFRKDFQFYKVREINNYHHAHDAYLNAVVGTALIKKYPKLESEFVYGDYKVYDVRKMIAKSEQEIGKATAKYFFYSNIMNFFKTEITLANGEIRKRPLIETNGETGEIVWDKGRDFATVRKVLSMPQVNIVKKTEVQTGGFSKESILPKRNSDKLIARKKDWDPKKYGGFDSPTVAYSVLVVAKVEKGKSKKLKSVKELLGITIMERSSFEKNPIDFLEAKGYKEVKKDLIIKLPKYSLFELENGRKRMLASAGELQKGNELALPSKYVNFLYLASHYEKLKGSPEDNEQKQLFVEQHKHYLDEIIEQISEFSKRVILADANLDKVLSAYNKHRDKPIREQAENIIHLFTLTNLGAPAAFKYFDTTIDRKRYTSTKEVLDATLIHQSITGLYETRIDLSQLGGDSGGKRPAATKKAGQAKKKKSGGGGSDAKSLTAWSRTLVTFKDVFVDFTREEWKLLDTAQQILYRNVMLENYKNLVSLGYQLTKPDVILRLEKGEEPWLVEREIHQETHPDSETAFEIKSSVGGGGSGKRPAATKKAGQAKKKKGSYPYDVPDYA

SEQ ID NO: 73 - protein, 1497 aa, Artificial Sequence
  Description of Artificial Sequence: Synthetic polypeptide
MAPKKKRKVGIHGVPAAAKRNYILGLAIGITSVGYGIIDYETRDVIDAGVRLFKEANVENNEGRRSKRGARRLKRRRRHRIQRVKKLLFDYNLLTDHSELSGINPYEARVKGLSQKLSEEEFSAALLHLAKRRGVHNVNEVEEDTGNELSTKEQISRNSKALEEKYVAELQLERLKKDGEVRGSINRFKTSDYVKEAKQLLKVQKAYHQLDQSFIDTYIDLLETRRTYYEGPGEGSPFGWKDIKEWYEMLMGHCTYFPEELRSVKYAYNADLYNALNDLNNLVITRDENEKLEYYEKFQIIENVFKQKKKPTLKQIAKEILVNEEDIKGYRVTSTGKPEFTNLKVYHDIKDITARKEIIENAELLDQIAKILTIYQSSEDIQEELTNLNSELTQEEIEQISNLKGYTGTHNLSLKAINLILDELWHTNDNQIAIFNRLKLVPKKVDLSQQKEIPTTLVDDFILSPVVKRSFIQSIKVINAIIKKYGLPNDIIIELAREKNSKDAQKMINEMQKRNRQTNERIEEIIRTTGKENAKYLIEKIKLHDMQEGKCLYSLEAIPLEDLLNNPFNYEVDAIIPRSVSFDNSFNNKVLVKQEENSKKGNRTPFQYLSSSDSKISYETFKKHILNLAKGKGRISKTKKEYLLEERDINRFSVQKDFINRNLVDTRYATRGLMNLLRSYFRVNNLDVKVKSINGGFTSFLRRKWKFKKERNKGYKHHAEDALIIANADFIFKEWKKLDKAKKVMENQMFEEKQAESMPEIETEQEYKEIFITPHQIKHIKDFKDYKYSHRVDKKPNRKLINDTLYSTRKDDKGNTLIVNNLNGLYDKDNDKLKKLINKSPEKLLMYHHDPQTYQKLKLIMEQYGDEKNPLYKYYEETGNYLTKYSKKDNGPVIKKIKYYGNKLNAHLDITDDYPNSRNKVVKLSLKPYRFDVYLDNGVYKFVTVKNLDVIKKENYYEVNSKCYEEAKKLKKISNQAEFIASFYKNDLIKINGELYRVIGVNNDLLNRIEVNMIDITYREYLENMNDKRPPHIIKTIASKTQSIKKYSTDILGNLYEVKSKKHPQIIKKGKRPAATKKAGQAKKKKARDSKVENKTKKLRVFEAFAGIGAQRKALEKVRKDEYEIVGLAEWYVPAIVMYQAIHNNFHTKLEYKSVSREEMIDYLENKTLSWNSKNPVSNGYWKRKKDDELKIIYNAIKLSEKEGNIFDIRDLYKRTLKNIDLLTYSFPCQDLSQQGIQKGMKRGSGTRSGLLWEIERALDSTEKNDLPKYLLMENVGALLHKKNEEELNQWKQKLESLGYQNSIEVLNAADFGSSQARRRVFMISTLNEFVELPKGDKKPKSIKKVLNKIVSEKDILNNLLKYNLTEFKKTKSNINKASLIGYSKFNSEGYVYDPEFTGPTLTASGANSRIKIKDGSNIRKMNSDETFLYIGFDSQDGKRVNEIEFLTENQKIFVCGNSISVEVLEAIIDKIGGPSSGGKRPAATKKAGQAKKKKGS

SEQ ID NO: 74 - protein, 1811 aa, Artificial Sequence
  Description of Artificial Sequence: Synthetic polypeptide
MAPKKKRKVGIHGVPAADKKYSIGLAIGTNSVGWAVITDEYKVPSKKFKVLGNTDRHSIKKNLIGALLFDSGETAEATRLKRTARRRYTRRKNRICYLQEIFSNEMAKVDDSFFHRLEESFLVEEDKKHERHPIFGNIVDEVAYHEKYPTIYHLRKKLVDSTDKADLRLIYLALAHMIKFRGHFLIEGDLNPDNSDVDKLFIQLVQTYNQLFEENPINASGVDAKAILSARLSKSRRLENLIAQLPGEKKNGLFGNLIALSLGLTPNFKSNFDLAEDAKLQLSKDTYDDDLDNLLAQIGDQYADLFLAAKNLSDAILLSDILRVNTEITKAPLSASMIKRYDEHHQDLTLLKALVRQQLPEKYKEIFFDQSKNGYAGYIDGGASQEEFYKFIKPILEKMDGTEELLVKLNREDLLRKQRTFDNGSIPHQIHLGELHAILRRQEDFYPFLKDNREKIEKILTFRIPYYVGPLARGNSRFAWMTRKSEETITPWNFEEVVDKGASAQSFIERMTNFDKNLPNEKVLPKHSLLYEYFTVYNELTKVKYVTEGMRKPAFLSGEQKKAIVDLLFKTNRKVTVKQLKEDYFKKIECFDSVEISGVEDRFNASLGTYHDLLKIIKDKDFLDNEENEDILEDIVLTLTLFEDREMIEERLKTYAHLFDDKVMKQLKRRRYTGWGRLSRKLINGIRDKQSGKTILDFLKSDGFANRNFMQLIHDDSLTFKEDIQKAQVSGQGDSLHEHIANLAGSPAIKKGILQTVKVVDELVKVMGRHKPENIVIEMARENQTTQKGQKNSRERMKRIEEGIKELGSQILKEHPVENTQLQNEKLYLYYLQNGRDMYVDQELDINRLSDYDVAAIVPQSFLKDDSIDNKVLTRSDKARGKSDNVPSEEVVKKMKNYWRQLLNAKLITQRKFDNLTKAERGGLSELDKAGFIKRQLVETRQITKHVAQILDSRMNTKYDENDKLIREVKVITLKSKLVSDFRKDFQFYKVREINNYHHAHDAYLNAVVGTALIKKYPKLESEFVYGDYKVYDVRKMIAKSEQEIGKATAKYFFYSNIMNFFKTEITLANGEIRKRPLIETNGETGEIVWDKGRDFATVRKVLSMPQVNIVKKTEVQTGGFSKESILPKRNSDKLIARKKDWDPKKYGGFDSPTVAYSVLVVAKVEKGKSKKLKSVKELLGITIMERSSFEKNPIDFLEAKGYKEVKKDLIIKLPKYSLFELENGRKRMLASAGELQKGNELALPSKYVNFLYLASHYEKLKGSPEDNEQKQLFVEQHKHYLDEIIEQISEFSKRVILADANLDKVLSAYNKHRDKPIREQAENIIHLFTLTNLGAPAAFKYFDTTIDRKRYTSTKEVLDATLIHQSITGLYETRIDLSQLGGDKRPAATKKAGQAKKKKARDSKVENKTKKLRVFEAFAGIGAQRKALEKVRKDEYEIVGLAEWYVPAIVMYQAIHNNFHTKLEYKSVSREEMIDYLENKTLSWNSKNPVSNGYWKRKKDDELKIIYNAIKLSEKEGNIFDIRDLYKRTLKNIDLLTYSFPCQDLSQQGIQKGMKRGSGTRSGLLWEIERALDSTEKNDLPKYLLMENVGALLHKKNEEELNQWKQKLESLGYQNSIEVLNAADFGSSQARRRVFMISTLNEFVELPKGDKKPKSIKKVLNKIVSEKDILNNLLKYNLTEFKKTKSNINKASLIGYSKFNSEGYVYDPEFTGPTLTASGANSRIKIKDGSNIRKMNSDETFLYIGFDSQDGKRVNEIEFLTENQKIFVCGNSISVEVLEAIIDKIGGPSSGGKRPAATKKAGQAKKKKGS

SEQ ID NO: 75 - protein, 1519 aa, Artificial Sequence
  Description of Artificial Sequence: Synthetic polypeptide
MAPKKKRKVGIHGVPAADKKYSIGLAIGTNSVGWAVITDEYKVPSKKFKVLGNTDRHSIKKNLIGALLFDSGETAEATRLKRTARRRYTRRKNRICYLQEIFSNEMAKVDDSFFHRLEESFLVEEDKKHERHPIFGNIVDEVAYHEKYPTIYHLRKKLVDSTDKADLRLIYLALAHMIKFRGHFLIEGDLNPDNSDVDKLFIQLVQTYNQLFEENPINASGVDAKAILSARLSKSRRLENLIAQLPGEKKNGLFGNLIALSLGLTPNFKSNFDLAEDAKLQLSKDTYDDDLDNLLAQIGDQYADLFLAAKNLSDAILLSDILRVNTEITKAPLSASMIKRYDEHHQDLTLLKALVRQQLPEKYKEIFFDQSKNGYAGYIDGGASQEEFYKFIKPILEKMDGTEELLVKLNREDLLRKQRTFDNGSIPHQIHLGELHAILRRQEDFYPFLKDNREKIEKILTFRIPYYVGPLARGNSRFAWMTRKSEETITPWNFEEVVDKGASAQSFIERMTNFDKNLPNEKVLPKHSLLYEYFTVYNELTKVKYVTEGMRKPAFLSGEQKKAIVDLLFKTNRKVTVKQLKEDYFKKIECFDSVEISGVEDRFNASLGTYHDLLKIIKDKDFLDNEENEDILEDIVLTLTLFEDREMIEERLKTYAHLFDDKVMKQLKRRRYTGWGRLSRKLINGIRDKQSGKTILDFLKSDGFANRNFMQLIHDDSLTFKEDIQKAQVSGQGDSLHEHIANLAGSPAIKKGILQTVKVVDELVKVMGRHKPENIVIEMARENQTTQKGQKNSRERMKRIEEGIKELGSQILKEHPVENTQLQNEKLYLYYLQNGRDMYVDQELDINRLSDYDVAAIVPQSFLKDDSIDNKVLTRSDKARGKSDNVPSEEVVKKMKNYWRQLLNAKLITQRKFDNLTKAERGGLSELDKAGFIKRQLVETRQITKHVAQILDSRMNTKYDENDKLIREVKVITLKSKLVSDFRKDFQFYKVREINNYHHAHDAYLNAVVGTALIKKYPKLESEFVYGDYKVYDVRKMIAKSEQEIGKATAKYFFYSNIMNFFKTEITLANGEIRKRPLIETNGETGEIVWDKGRDFATVRKVLSMPQVNIVKKTEVQTGGFSKESILPKRNSDKLIARKKDWDPKKYGGFDSPTVAYSVLVVAKVEKGKSKKLKSVKELLGITIMERSSFEKNPIDFLEAKGYKEVKKDLIIKLPKYSLFELENGRKRMLASAGELQKGNELALPSKYVNFLYLASHYEKLKGSPEDNEQKQLFVEQHKHYLDEIIEQISEFSKRVILADANLDKVLSAYNKHRDKPIREQAENIIHLFTLTNLGAPAAFKYFDTTIDRKRYTSTKEVLDATLIHQSITGLYETRIDLSQLGGDKRPAATKKAGQAKKKKASDAKSLTAWSRTLVTFKDVFVDFTREEWKLLDTAQQILYRNVMLENYKNLVSLGYQLTKPDVILRLEKGEEPWLVEREIHQETHPDSETAFEIKSSVSGGKRPAATKKAGQAKKKKGS

SEQ ID NO: 76 - protein, 2168 aa, Artificial Sequence
  Description of Artificial Sequence: Synthetic polypeptide
MAPKKKRKVGGSGGSGQTGKKSEKGPVCWRKRVKSEYMRLRQLKRFRRADEVKSMFSSNRQKILERTEILNQEWKQRRIQPVHILTSVSSLRGTRECSVTSDLDFPTQVIPLKTLNAVASVPIMYSWSPLQQNFMVEDETVLHNIPYMGDEVLDQDGTFIEELIKNYDGKVHGDRECGFINDEIFVELVNALGQYNDDDDDDDGDDPEEREEKQKDLEDHRDDKESRPPRKFPSDKIFEAISSMFPDKGTAEELKEKYKELTEQQLPGALPPECTPNIDGPNAKSVQREQSLHSFHTLFCRRCFKYDCFLHPFHATPNTYKRKNTETALDNKPCGPQCYQHLEGAKEFAAALTAERIKTPPKRPGGRRRGRLPNNSSRPSTPTINVLESKDTDSDREAGTETGGENNDKEEEEKKDETSSSSEANSRCQTPIKMKPNIEPPENVEWSGAEASMFRVLIGTYYDNFCAIARLIGTKTCRQVYEFRVKESSIIAPAPAEDVDTPPRKKKRKHRLWAAHCRKIQLKKDGSSNHVYNYQPCDHPRQPCDSSCPCVIAQNFCEKFCQCSSECQNRFPGCRCKAQCNTKQCPCYLAVRECDPDLCLTCGAADHWDSKNVSCKNCSIQRGSKKHLLLAPSDVAGWGIFIKDPVQKNEFISEYCGEIISQDEADRRGKVYDKYMCSFLFNLNNDFVVDATRKGNKIRFANHSVNPNCYAKVMMVNGDHRIGIFAKRAIQTGEELFFDYRYSQADALKYVGIEREMEIPSTGGSGGSGGSGGSGGSGRPDKKYSIGLAIGTNSVGWAVITDEYKVPSKKFKVLGNTDRHSIKKNLIGALLFDSGETAEATRLKRTARRRYTRRKNRICYLQEIFSNEMAKVDDSFFHRLEESFLVEEDKKHERHPIFGNIVDEVAYHEKYPTIYHLRKKLVDSTDKADLRLIYLALAHMIKFRGHFLIEGDLNPDNSDVDKLFIQLVQTYNQLFEENPINASGVDAKAILSARLSKSRRLENLIAQLPGEKKNGLFGNLIALSLGLTPNFKSNFDLAEDAKLQLSKDTYDDDLDNLLAQIGDQYADLFLAAKNLSDAILLSDILRVNTEITKAPLSASMIKRYDEHHQDLTLLKALVRQQLPEKYKEIFFDQSKNGYAGYIDGGASQEEFYKFIKPILEKMDGTEELLVKLNREDLLRKQRTFDNGSIPHQIHLGELHAILRRQEDFYPFLKDNREKIEKILTFRIPYYVGPLARGNSRFAWMTRKSEETITPWNFEEVVDKGASAQSFIERMTNFDKNLPNEKVLPKHSLLYEYFTVYNELTKVKYVTEGMRKPAFLSGEQKKAIVDLLFKTNRKVTVKQLKEDYFKKIECFDSVEISGVEDRFNASLGTYHDLLKIIKDKDFLDNEENEDILEDIVLTLTLFEDREMIEERLKTYAHLFDDKVMKQLKRRRYTGWGRLSRKLINGIRDKQSGKTILDFLKSDGFANRNFMQLIHDDSLTFKEDIQKAQVSGQGDSLHEHIANLAGSPAIKKGILQTVKVVDELVKVMGRHKPENIVIEMARENQTTQKGQKNSRERMKRIEEGIKELGSQILKEHPVENTQLQNEKLYLYYLQNGRDMYVDQELDINRLSDYDVAAIVPQSFLKDDSIDNKVLTRSDKARGKSDNVPSEEVVKKMKNYWRQLLNAKLITQRKFDNLTKAERGGLSELDKAGFIKRQLVETRQITKHVAQILDSRMNTKYDENDKLIREVKVITLKSKLVSDFRKDFQFYKVREINNYHHAHDAYLNAVVGTALIKKYPKLESEFVYGDYKVYDVRKMIAKSEQEIGKATAKYFFYSNIMNFFKTEITLANGEIRKRPLIETNGETGEIVWDKGRDFATVRKVLSMPQVNIVKKTEVQTGGFSKESILPKRNSDKLIARKKDWDPKKYGGFDSPTVAYSVLVVAKVEKGKSKKLKSVKELLGITIMERSSFEKNPIDFLEAKGYKEVKKDLIIKLPKYSLFELENGRKRMLASAGELQKGNELALPSKYVNFLYLASHYEKLKGSPEDNEQKQLFVEQHKHYLDEIIEQISEFSKRVILADANLDKVLSAYNKHRDKPIREQAENIIHLFTLTNLGAPAAFKYFDTTIDRKRYTSTKEVLDATLIHQSITGLYETRIDLSQLGGDSGGKRPAATKKAGQAKKKKGS

SEQ ID NO: 77 - protein, 1977 aa, Artificial Sequence
  Description of Artificial Sequence: Synthetic polypeptide
MAPKKKRKVGIHGVPAADKKYSIGLAIGTNSVGWAVITDEYKVPSKKFKVLGNTDRHSIKKNLIGALLFDSGETAEATRLKRTARRRYTRRKNRICYLQEIFSNEMAKVDDSFFHRLEESFLVEEDKKHERHPIFGNIVDEVAYHEKYPTIYHLRKKLVDSTDKADLRLIYLALAHMIKFRGHFLIEGDLNPDNSDVDKLFIQLVQTYNQLFEENPINASGVDAKAILSARLSKSRRLENLIAQLPGEKKNGLFGNLIALSLGLTPNFKSNFDLAEDAKLQLSKDTYDDDLDNLLAQIGDQYADLFLAAKNLSDAILLSDILRVNTEITKAPLSASMIKRYDEHHQDLTLLKALVRQQLPEKYKEIFFDQSKNGYAGYIDGGASQEEFYKFIKPILEKMDGTEELLVKLNREDLLRKQRTFDNGSIPHQIHLGELHAILRRQEDFYPFLKDNREKIEKILTFRIPYYVGPLARGNSRFAWMTRKSEETITPWNFEEVVDKGASAQSFIERMTNFDKNLPNEKVLPKHSLLYEYFTVYNELTKVKYVTEGMRKPAFLSGEQKKAIVDLLFKTNRKVTVKQLKEDYFKKIECFDSVEISGVEDRFNASLGTYHDLLKIIKDKDFLDNEENEDILEDIVLTLTLFEDREMIEERLKTYAHLFDDKVMKQLKRRRYTGWGRLSRKLINGIRDKQSGKTILDFLKSDGFANRNFMQLIHDDSLTFKEDIQKAQVSGQGDSLHEHIANLAGSPAIKKGILQTVKVVDELVKVMGRHKPENIVIEMARENQTTQKGQKNSRERMKRIEEGIKELGSQILKEHPVENTQLQNEKLYLYYLQNGRDMYVDQELDINRLSDYDVAAIVPQSFLKDDSIDNKVLTRSDKARGKSDNVPSEEVVKKMKNYWRQLLNAKLITQRKFDNLTKAERGGLSELDKAGFIKRQLVETRQITKHVAQILDSRMNTKYDENDKLIREVKVITLKSKLVSDFRKDFQFYKVREINNYHHAHDAYLNAVVGTALIKKYPKLESEFVYGDYKVYDVRKMIAKSEQEIGKATAKYFFYSNIMNFFKTEITLANGEIRKRPLIETNGETGEIVWDKGRDFATVRKVLSMPQVNIVKKTEVQTGGFSKESILPKRNSDKLIARKKDWDPKKYGGFDSPTVAYSVLVVAKVEKGKSKKLKSVKELLGITIMERSSFEKNPIDFLEAKGYKEVKKDLIIKLPKYSLFELENGRKRMLASAGELQKGNELALPSKYVNFLYLASHYEKLKGSPEDNEQKQLFVEQHKHYLDEIIEQISEFSKRVILADANLDKVLSAYNKHRDKPIREQAENIIHLFTLTNLGAPAAFKYFDTTIDRKRYTSTKEVLDATLIHQSITGLYETRIDLSQLGGDSAGGGGSGGGGSGGGGSGPKKKRKVAAAGSNHDQEFDPPKVYPPVPAEKRKPIRVLSLFDGIATGLLVLKDLGIQVDRYIASEVCEDSITVGMVRHQGKIMYVGDVRSVTQKHIQEWGPFDLVIGGSPCNDLSIVNPARKGLYEGTGRLFFEFYRLLHDARPKEGDDRPFFWLFENVVAMGVSDKRDISRFLESNPVMIDAKEVSAAHRARYFWGNLPGMNRPLASTVNDKLELQECLEHGRIAKFSKVRTITTRSNSIKQGKDQHFPVFMNEKEDILWCTEMERVFGFPVHYTDVSNMSRLARQRLLGRSWSVPVIRHLFAPLKEYFACVSSGNSNANSRGPSFSSGLVPLSLRGSHMNPLEMFETVPVWRRQPVRVLSLFEDIKKELTSLGFLESGSDPGQLKHVVDVTDTVRKDVEEWGPFDLVYGATPPLGHTCDRPPSWYLFQFHRLLQYARPKPGSPRPFFWMFVDNLVLNKEDLDVASRFLEMEPVTIPDVHGGSLQNAVRVWSNIPAIRSRHWALVSEEELSLLAQNKQSSKLAAKWPTKLVKNCFLPLREYFKYFSTELTSSLSGGKRPAATKKAGQAKKKKGS

SEQ ID NO: 78 - protein, 1809 aa, Artificial Sequence
  Description of Artificial Sequence: Synthetic polypeptide
MAPKKKRKVGIHGVPAADKKYSIGLAIGTNSVGWAVITDEYKVPSKKFKVLGNTDRHSIKKNLIGALLFDSGETAEATRLKRTARRRYTRRKNRICYLQEIFSNEMAKVDDSFFHRLEESFLVEEDKKHERHPIFGNIVDEVAYHEKYPTIYHLRKKLVDSTDKADLRLIYLALAHMIKFRGHFLIEGDLNPDNSDVDKLFIQLVQTYNQLFEENPINASGVDAKAILSARLSKSRRLENLIAQLPGEKKNGLFGNLIALSLGLTPNFKSNFDLAEDAKLQLSKDTYDDDLDNLLAQIGDQYADLFLAAKNLSDAILLSDILRVNTEITKAPLSASMIKRYDEHHQDLTLLKALVRQQLPEKYKEIFFDQSKNGYAGYIDGGASQEEFYKFIKPILEKMDGTEELLVKLNREDLLRKQRTFDNGSIPHQIHLGELHAILRRQEDFYPFLKDNREKIEKILTFRIPYYVGPLARGNSRFAWMTRKSEETITPWNFEEVVDKGASAQSFIERMTNFDKNLPNEKVLPKHSLLYEYFTVYNELTKVKYVTEGMRKPAFLSGEQKKAIVDLLFKTNRKVTVKQLKEDYFKKIECFDSVEISGVEDRFNASLGTYHDLLKIIKDKDFLDNEENEDILEDIVLTLTLFEDREMIEERLKTYAHLFDDKVMKQLKRRRYTGWGRLSRKLINGIRDKQSGKTILDFLKSDGFANRNFMQLIHDDSLTFKEDIQKAQVSGQGDSLHEHIANLAGSPAIKKGILQTVKVVDELVKVMGRHKPENIVIEMARENQTTQKGQKNSRERMKRIEEGIKELGSQILKEHPVENTQLQNEKLYLYYLQNGRDMYVDQELDINRLSDYDVAAIVPQSFLKDDSIDNKVLTRSDKARGKSDNVPSEEVVKKMKNYWRQLLNAKLITQRKFDNLTKAERGGLSELDKAGFIKRQLVETRQITKHVAQILDSRMNTKYDENDKLIREVKVITLKSKLVSDFRKDFQFYKVREINNYHHAHDAYLNAVVGTALIKKYPKLESEFVYGDYKVYDVRKMIAKSEQEIGKATAKYFFYSNIMNFFKTEITLANGEIRKRPLIETNGETGEIVWDKGRDFATVRKVLSMPQVNIVKKTEVQTGGFSKESILPKRNSDKLIARKKDWDPKKYGGFDSPTVAYSVLVVAKVEKGKSKKLKSVKELLGITIMERSSFEKNPIDFLEAKGYKEVKKDLIIKLPKYSLFELENGRKRMLASAGELQKGNELALPSKYVNFLYLASHYEKLKGSPEDNEQKQLFVEQHKHYLDEIIEQISEFSKRVILADANLDKVLSAYNKHRDKPIREQAENIIHLFTLTNLGAPAAFKYFDTTIDRKRYTSTKEVLDATLIHQSITGLYETRIDLSQLGGDSGGKRPAATKKAGQAKKKKSGGGGSEEPEEPADSGQSLVPVYIYSPEYVSMCDSLAKIPKRASMVHSLIEAYALHKQMRIVKPKVASMEEMATFHTDAYLQHLQKVSQEGDDDHPDSIEYGLGYDCPATEGIFDYAAAIGGATITAAQCLIDGMCKVAINWSGGWHHAKKDEASGFCYLNDAVLGILRLRRKFERILYVDLDLHHGDGVEDAFSFTSKVMTVSLHKFSPGFFPGTGDVSDVGLGKGRYYSVNVPIQDGIQDEKYYQICESVLKEVYQAFNPKAVVLQLGADTIAGDPMCSFNMTPVGIGKCLKYILQWQLATLILGGGGYNLANTARCWTYLTGVILGKTLSSEIPDHEFFTAYGPDYVLEITPSCRPDRNEPHRIQQILNYIKGNLKHVVGGGGSGKRPAATKKAGQAKKKKGS

SEQ ID NO: 79 - protein, 2572 aa, Artificial Sequence
  Description of Artificial Sequence: Synthetic polypeptide
MAPKKKRKVGGSGGSGQTGKKSEKGPVCWRKRVKSEYMRLRQLKRFRRADEVKSMFSSNRQKILERTEILNQEWKQRRIQPVHILTSVSSLRGTRECSVTSDLDFPTQVIPLKTLNAVASVPIMYSWSPLQQNFMVEDETVLHNIPYMGDEVLDQDGTFIEELIKNYDGKVHGDRECGFINDEIFVELVNALGQYNDDDDDDDGDDPEEREEKQKDLEDHRDDKESRPPRKFPSDKIFEAISSMFPDKGTAEELKEKYKELTEQQLPGALPPECTPNIDGPNAKSVQREQSLHSFHTLFCRRCFKYDCFLHPFHATPNTYKRKNTETALDNKPCGPQCYQHLEGAKEFAAALTAERIKTPPKRPGGRRRGRLPNNSSRPSTPTINVLESKDTDSDREAGTETGGENNDKEEEEKKDETSSSSEANSRCQTPIKMKPNIEPPENVEWSGAEASMFRVLIGTYYDNFCAIARLIGTKTCRQVYEFRVKESSIIAPAPAEDVDTPPRKKKRKHRLWAAHCRKIQLKKDGSSNHVYNYQPCDHPRQPCDSSCPCVIAQNFCEKFCQCSSECQNRFPGCRCKAQCNTKQCPCYLAVRECDPDLCLTCGAADHWDSKNVSCKNCSIQRGSKKHLLLAPSDVAGWGIFIKDPVQKNEFISEYCGEIISQDEADRRGKVYDKYMCSFLFNLNNDFVVDATRKGNKIRFANHSVNPNCYAKVMMVNGDHRIGIFAKRAIQTGEELFFDYRYSQADALKYVGIEREMEIPSTGGSGGSGGSGGSGGSGRPDKKYSIGLAIGTNSVGWAVITDEYKVPSKKFKVLGNTDRHSIKKNLIGALLFDSGETAEATRLKRTARRRYTRRKNRICYLQEIFSNEMAKVDDSFFHRLEESFLVEEDKKHERHPIFGNIVDEVAYHEKYPTIYHLRKKLVDSTDKADLRLIYLALAHMIKFRGHFLIEGDLNPDNSDVDKLFIQLVQTYNQLFEENPINASGVDAKAILSARLSKSRRLENLIAQLPGEKKNGLFGNLIALSLGLTPNFKSNFDLAEDAKLQLSKDTYDDDLDNLLAQIGDQYADLFLAAKNLSDAILLSDILRVNTEITKAPLSASMIKRYDEHHQDLTLLKALVRQQLPEKYKEIFFDQSKNGYAGYIDGGASQEEFYKFIKPILEKMDGTEELLVKLNREDLLRKQRTFDNGSIPHQIHLGELHAILRRQEDFYPFLKDNREKIEKILTFRIPYYVGPLARGNSRFAWMTRKSEETITPWNFEEVVDKGASAQSFIERMTNFDKNLPNEKVLPKHSLLYEYFTVYNELTKVKYVTEGMRKPAFLSGEQKKAIVDLLFKTNRKVTVKQLKEDYFKKIECFDSVEISGVEDRFNASLGTYHDLLKIIKDKDFLDNEENEDILEDIVLTLTLFEDREMIEERLKTYAHLFDDKVMKQLKRRRYTGWGRLSRKLINGIRDKQSGKTILDFLKSDGFANRNFMQLIHDDSLTFKEDIQKAQVSGQGDSLHEHIANLAGSPAIKKGILQTVKVVDELVKVMGRHKPENIVIEMARENQTTQKGQKNSRERMKRIEEGIKELGSQILKEHPVENTQLQNEKLYLYYLQNGRDMYVDQELDINRLSDYDVAAIVPQSFLKDDSIDNKVLTRSDKARGKSDNVPSEEVVKKMKNYWRQLLNAKLITQRKFDNLTKAERGGLSELDKAGFIKRQLVETRQITKHVAQILDSRMNTKYDENDKLIREVKVITLKSKLVSDFRKDFQFYKVREINNYHHAHDAYLNAVVGTALIKKYPKLESEFVYGDYKVYDVRKMIAKSEQEIGKATAKYFFYSNIMNFFKTEITLANGEIRKRPLIETNGETGEIVWDKGRDFATVRKVLSMPQVNIVKKTEVQTGGFSKESILPKRNSDKLIARKKDWDPKKYGGFDSPTVAYSVLVVAKVEKGKSKKLKSVKELLGITIMERSSFEKNPIDFLEAKGYKEVKKDLIIKLPKYSLFELENGRKRMLASAGELQKGNELALPSKYVNFLYLASHYEKLKGSPEDNEQKQLFVEQHKHYLDEIIEQISEFSKRVILADANLDKVLSAYNKHRDKPIREQAENIIHLFTLTNLGAPAAFKYFDTTIDRKRYTSTKEVLDATLIHQSITGLYETRIDLSQLGGDSGGKRPAATKKAGQAKKKKSGGGGSEEPEEPADSGQSLVPVYIYSPEYVSMCDSLAKIPKRASMVHSLIEAYALHKQMRIVKPKVASMEEMATFHTDAYLQHLQKVSQEGDDDHPDSIEYGLGYDCPATEGIFDYAAAIGGATITAAQCLIDGMCKVAINWSGGWHHAKKDEASGFCYLNDAVLGILRLRRKFERILYVDLDLHHGDGVEDAFSFTSKVMTVSLHKFSPGFFPGTGDVSDVGLGKGRYYSVNVPIQDGIQDEKYYQICESVLKEVYQAFNPKAVVLQLGADTIAGDPMCSFNMTPVGIGKCLKYILQWQLATLILGGGGYNLANTARCWTYLTGVILGKTLSSEIPDHEFFTAYGPDYVLEITPSCRPDRNEPHRIQQILNYIKGNLKHVVGGGGSGKRPAATKKAGQAKKKKGS

SEQ ID NO: 80 - protein, 2572 aa, Artificial Sequence
  Description of Artificial Sequence: Synthetic polypeptide
MAPKKKRKVGIHGVPAASGGGGSGSAAIAEVLLNARCDLHAVNYHGDTPLHIAARESYHDCVLLFLSRGANPELRNKEGDTAWDLTPERSDVWFALQLNRKLRLGVGNRAIRTEKIICRDVARGYENVPIPCVNGVDGEPCPEDYKYISENCETSTMNIDRNITHLQHCTCVDDCSSSNCLCGQLSIRCWYDKDGRLLQEFNKIEPPLIFECNQACSCWRNCKNRVVQSGIKVRLQLYRTAKMGWGVRALQTIPQGTFICEYVGELISDAEADVREDDSYLFDLDNKDGEVYCIDARYYGNISRFINHLCDPNIIPVRVFMLHQDLRFPRIAFFSSRDIRTGEELGFDYGDRFWDIKSKYFTCQCGSEKCKHSAEAIALEQSRLARLDPHPELLPELGSLPPVNTGGGGSGDKKYSIGLAIGTNSVGWAVITDEYKVPSKKFKVLGNTDRHSIKKNLIGALLFDSGETAEATRLKRTARRRYTRRKNRICYLQEIFSNEMAKVDDSFFHRLEESFLVEEDKKHERHPIFGNIVDEVAYHEKYPTIYHLRKKLVDSTDKADLRLIYLALAHMIKFRGHFLIEGDLNPDNSDVDKLFIQLVQTYNQLFEENPINASGVDAKAILSARLSKSRRLENLIAQLPGEKKNGLFGNLIALSLGLTPNFKSNFDLAEDAKLQLSKDTYDDDLDNLLAQIGDQYADLFLAAKNLSDAILLSDILRVNTEITKAPLSASMIKRYDEHHQDLTLLKALVRQQLPEKYKEIFFDQSKNGYAGYIDGGASQEEFYKFIKPILEKMDGTEELLVKLNREDLLRKQRTFDNGSIPHQIHLGELHAILRRQEDFYPFLKDNREKIEKILTFRIPYYVGPLARGNSRFAWMTRKSEETITPWNFEEVVDKGASAQSFIERMTNFDKNLPNEKVLPKHSLLYEYFTVYNELTKVKYVTEGMRKPAFLSGEQKKAIVDLLFKTNRKVTVKQLKEDYFKKIECFDSVEISGVEDRFNASLGTYHDLLKIIKDKDFLDNEENEDILEDIVLTLTLFEDREMIEERLKTYAHLFDDKVMKQLKRRRYTGWGRLSRKLINGIRDKQSGKTILDFLKSDGFANRNFMQLIHDDSLTFKEDIQKAQVSGQGDSLHEHIANLAGSPAIKKGILQTVKVVDELVKVMGRHKPENIVIEMARENQTTQKGQKNSRERMKRIEEGIKELGSQILKEHPVENTQLQNEKLYLYYLQNGRDMYVDQELDINRLSDYDVAAIVPQSFLKDDSIDNKVLTRSDKARGKSDNVPSEEVVKKMKNYWRQLLNAKLITQRKFDNLTKAERGGLSELDKAGFIKRQLVETRQITKHVAQILDSRMNTKYDENDKLIREVKVITLKSKLVSDFRKDFQFYKVREINNYHHAHDAYLNAVVGTALIKKYPKLESEFVYGDYKVYDVRKMIAKSEQEIGKATAKYFFYSNIMNFFKTEITLANGEIRKRPLIETNGETGEIVWDKGRDFATVRKVLSMPQVNIVKKTEVQTGGFSKESILPKRNSDKLIARKKDWDPKKYGGFDSPTVAYSVLVVAKVEKGKSKKLKSVKELLGITIMERSSFEKNPIDFLEAKGYKEVKKDLIIKLPKYSLFELENGRKRMLASAGELQKGNELALPSKYVNFLYLASHYEKLKGSPEDNEQKQLFVEQHKHYLDEIIEQISEFSKRVILADANLDKVLSAYNKHRDKPIREQAENIIHLFTLTNLGAPAAFKYFDTTIDRKRYTSTKEVLDATLIHQSITGLYETRIDLSQLGGDSGGKRPAATKKAGQAKKKKSGGGGSGQTGKKSEKGPVCWRKRVKSEYMRLRQLKRFRRADEVKSMFSSNRQKILERTEILNQEWKQRRIQPVHILTSVSSLRGTRECSVTSDLDFPTQVIPLKTLNAVASVPIMYSWSPLQQNFMVEDETVLHNIPYMGDEVLDQDGTFIEELIKNYDGKVHGDRECGFINDEIFVELVNALGQYNDDDDDDDGDDPEEREEKQKDLEDHRDDKESRPPRKFPSDKIFEAISSMFPDKGTAEELKEKYKELTEQQLPGALPPECTPNIDGPNAKSVQREQSLHSFHTLFCRRCFKYDCFLHPFHATPNTYKRKNTETALDNKPCGPQCYQHLEGAKEFAAALTAERIKTPPKRPGGRRRGRLPNNSSRPSTPTINVLESKDTDSDREAGTETGGENNDKEEEEKKDETSSSSEANSRCQTPIKMKPNIEPPENVEWSGAEASMFRVLIGTYYDNFCAIARLIGTKTCRQVYEFRVKESSIIAPAPAEDVDTPPRKKKRKHRLWAAHCRKIQLKKDGSSNHVYNYQPCDHPRQPCDSSCPCVIAQNFCEKFCQCSSECQNRFPGCRCKAQCNTKQCPCYLAVRECDPDLCLTCGAADHWDSKNVSCKNCSIQRGSKKHLLLAPSDVAGWGIFIKDPVQKNEFISEYCGEIISQDEADRRGKVYDKYMCSFLFNLNNDFVVDATRKGNKIRFANHSVNPNCYAKVMMVNGDHRIGIFAKRAIQTGEELFFDYRYSQADALKYVGIEREMEIPGGGGSGKRPAATKKAGQAKKKKGS

SEQ ID NO: 81 - protein, 1923 aa, Artificial Sequence
  Description of Artificial Sequence: Synthetic polypeptide
MAPKKKRKVGIHGVPAASGGGGSGSAAIAEVLLNARCDLHAVNYHGDTPLHIAARESYHDCVLLFLSRGANPELRNKEGDTAWDLTPERSDVWFALQLNRKLRLGVGNRAIRTEKIICRDVARGYENVPIPCVNGVDGEPCPEDYKYISENCETSTMNIDRNITHLQHCTCVDDCSSSNCLCGQLSIRCWYDKDGRLLQEFNKIEPPLIFECNQACSCWRNCKNRVVQSGIKVRLQLYRTAKMGWGVRALQTIPQGTFICEYVGELISDAEADVREDDSYLFDLDNKDGEVYCIDARYYGNISRFINHLCDPNIIPVRVFMLHQDLRFPRIAFFSSRDIRTGEELGFDYGDRFWDIKSKYFTCQCGSEKCKHSAEAIALEQSRLARLDPHPELLPELGSLPPVNTGGGGSGDKKYSIGLAIGTNSVGWAVITDEYKVPSKKFKVLGNTDRHSIKKNLIGALLFDSGETAEATRLKRTARRRYTRRKNRICYLQEIFSNEMAKVDDSFFHRLEESFLVEEDKKHERHPIFGNIVDEVAYHEKYPTIYHLRKKLVDSTDKADLRLIYLALAHMIKFRGHFLIEGDLNPDNSDVDKLFIQLVQTYNQLFEENPINASGVDAKAILSARLSKSRRLENLIAQLPGEKKNGLFGNLIALSLGLTPNFKSNFDLAEDAKLQLSKDTYDDDLDNLLAQIGDQYADLFLAAKNLSDAILLSDILRVNTEITKAPLSASMIKRYDEHHQDLTLLKALVRQQLPEKYKEIFFDQSKNGYAGYIDGGASQEEFYKFIKPILEKMDGTEELLVKLNREDLLRKQRTFDNGSIPHQIHLGELHAILRRQEDFYPFLKDNREKIEKILTFRIPYYVGPLARGNSRFAWMTRKSEETITPWNFEEVVDKGASAQSFIERMTNFDKNLPNEKVLPKHSLLYEYFTVYNELTKVKYVTEGMRKPAFLSGEQKKAIVDLLFKTNRKVTVKQLKEDYFKKIECFDSVEISGVEDRFNASLGTYHDLLKIIKDKDFLDNEENEDILEDIVLTLTLFEDREMIEERLKTYAHLFDDKVMKQLKRRRYTGWGRLSRKLINGIRDKQSGKTILDFLKSDGFANRNFMQLIHDDSLTFKEDIQKAQVSGQGDSLHEHIANLAGSPAIKKGILQTVKVVDELVKVMGRHKPENIVIEMARENQTTQKGQKNSRERMKRIEEGIKELGSQILKEHPVENTQLQNEKLYLYYLQNGRDMYVDQELDINRLSDYDVAAIVPQSFLKDDSIDNKVLTRSDKARGKSDNVPSEEVVKKMKNYWRQLLNAKLITQRKFDNLTKAERGGLSELDKAGFIKRQLVETRQITKHVAQILDSRMNTKYDENDKLIREVKVITLKSKLVSDFRKDFQFYKVREINNYHHAHDAYLNAVVGTALIKKYPKLESEFVYGDYKVYDVRKMIAKSEQEIGKATAKYFFYSNIMNFFKTEITLANGEIRKRPLIETNGETGEIVWDKGRDFATVRKVLSMPQVNIVKKTEVQTGGFSKESILPKRNSDKLIARKKDWDPKKYGGFDSPTVAYSVLVVAKVEKGKSKKLKSVKELLGITIMERSSFEKNPIDFLEAKGYKEVKKDLIIKLPKYSLFELENGRKRMLASAGELQKGNELALPSKYVNFLYLASHYEKLKGSPEDNEQKQLFVEQHKHYLDEIIEQISEFSKRVILADANLDKVLSAYNKHRDKPIREQAENIIHLFTLTNLGAPAAFKYFDTTIDRKRYTSTKEVLDATLIHQSITGLYETRIDLSQLGGDSGGKRPAATKKAGQAKKKKSGGGGSDAKSLTAWSRTLVTFKDVFVDFTREEWKLLDTAQQILYRNVMLENYKNLVSLGYQLTKPDVILRLEKGEEPWLVEREIHQETHPDSETAFEIKSSVGGGGSGKRPAATKKAGQAKKKKGS

SEQ ID NO: 82 - protein, 2292 aa, Artificial Sequence
  Description of Artificial Sequence: Synthetic polypeptide
MAPKKKRKVGGSGGSGQTGKKSEKGPVCWRKRVKSEYMRLRQLKRFRRADEVKSMFSSNRQKILERTEILNQEWKQRRIQPVHILTSVSSLRGTRECSVTSDLDFPTQVIPLKTLNAVASVPIMYSWSPLQQNFMVEDETVLHNIPYMGDEVLDQDGTFIEELIKNYDGKVHGDRECGFINDEIFVELVNALGQYNDDDDDDDGDDPEEREEKQKDLEDHRDDKESRPPRKFPSDKIFEAISSMFPDKGTAEELKEKYKELTEQQLPGALPPECTPNIDGPNAKSVQREQSLHSFHTLFCRRCFKYDCFLHPFHATPNTYKRKNTETALDNKPCGPQCYQHLEGAKEFAAALTAERIKTPPKRPGGRRRGRLPNNSSRPSTPTINVLESKDTDSDREAGTETGGENNDKEEEEKKDETSSSSEANSRCQTPIKMKPNIEPPENVEWSGAEASMFRVLIGTYYDNFCAIARLIGTKTCRQVYEFRVKESSIIAPAPAEDVDTPPRKKKRKHRLWAAHCRKIQLKKDGSSNHVYNYQPCDHPRQPCDSSCPCVIAQNFCEKFCQCSSECQNRFPGCRCKAQCNTKQCPCYLAVRECDPDLCLTCGAADHWDSKNVSCKNCSIQRGSKKHLLLAPSDVAGWGIFIKDPVQKNEFISEYCGEIISQDEADRRGKVYDKYMCSFLFNLNNDFVVDATRKGNKIRFANHSVNPNCYAKVMMVNGDHRIGIFAKRAIQTGEELFFDYRYSQADALKYVGIEREMEIPSTGGSGGSGGSGGSGGSGRPDKKYSIGLAIGTNSVGWAVITDEYKVPSKKFKVLGNTDRHSIKKNLIGALLFDSGETAEATRLKRTARRRYTRRKNRICYLQEIFSNEMAKVDDSFFHRLEESFLVEEDKKHERHPIFGNIVDEVAYHEKYPTIYHLRKKLVDSTDKADLRLIYLALAHMIKFRGHFLIEGDLNPDNSDVDKLFIQLVQTYNQLFEENPINASGVDAKAILSARLSKSRRLENLIAQLPGEKKNGLFGNLIALSLGLTPNFKSNFDLAEDAKLQLSKDTYDDDLDNLLAQIGDQYADLFLAAKNLSDAILLSDILRVNTEITKAPLSASMIKRYDEHHQDLTLLKALVRQQLPEKYKEIFFDQSKNGYAGYIDGGASQEEFYKFIKPILEKMDGTEELLVKLNREDLLRKQRTFDNGSIPHQIHLGELHAILRRQEDFYPFLKDNREKIEKILTFRIPYYVGPLARGNSRFAWMTRKSEETITPWNFEEVVDKGASAQSFIERMTNFDKNLPNEKVLPKHSLLYEYFTVYNELTKVKYVTEGMRKPAFLSGEQKKAIVDLLFKTNRKVTVKQLKEDYFKKIECFDSVEISGVEDRFNASLGTYHDLLKIIKDKDFLDNEENEDILEDIVLTLTLFEDREMIEERLKTYAHLFDDKVMKQLKRRRYTGWGRLSRKLINGIRDKQSGKTILDFLKSDGFANRNFMQLIHDDSLTFKEDIQKAQVSGQGDSLHEHIANLAGSPAIKKGILQTVKVVDELVKVMGRHKPENIVIEMARENQTTQKGQKNSRERMKRIEEGIKELGSQILKEHPVENTQLQNEKLYLYYLQNGRDMYVDQELDINRLSDYDVAAIVPQSFLKDDSIDNKVLTRSDKARGKSDNVPSEEVVKKMKNYWRQLLNAKLITQRKFDNLTKAERGGLSELDKAGFIKRQLVETRQITKHVAQILDSRMNTKYDENDKLIREVKVITLKSKLVSDFRKDFQFYKVREINNYHHAHDAYLNAVVGTALIKKYPKLESEFVYGDYKVYDVRKMIAKSEQEIGKATAKYFFYSNIMNFFKTEITLANGEIRKRPLIETNGETGEIVWDKGRDFATVRKVLSMPQVNIVKKTEVQTGGFSKESILPKRNSDKLIARKKDWDPKKYGGFDSPTVAYSVLVVAKVEKGKSKKLKSVKELLGITIMERSSFEKNPIDFLEAKGYKEVKKDLIIKLPKYSLFELENGRKRMLASAGELQKGNELALPSKYVNFLYLASHYEKLKGSPEDNEQKQLFVEQHKHYLDEIIEQISEFSKRVILADANLDKVLSAYNKHRDKPIREQAENIIHLFTLTNLGAPAAFKYFDTTIDRKRYTSTKEVLDATLIHQSITGLYETRIDLSQLGGDSGGKRPAATKKAGQAKKKKSGGGGSDAKSLTAWSRTLVTFKDVFVDFTREEWKLLDTAQQILYRNVMLENYKNLVSLGYQLTKPDVILRLEKGEEPWLVEREIHQETHPDSETAFEIKSSVGGGGSGKRPAATKKAGQAKKKKGS

SEQ ID NO: 83 - skipped

SEQ ID NO: 84 - protein, 1405 aa, Artificial Sequence
  Description of Artificial Sequence: Synthetic polypeptide
MAPKKKRKVGIHGVPAADKKYSIGLDIGTNSVGWAVITDEYKVPSKKFKVLGNTDRHSIKKNLIGALLFDSGETAEATRLKRTARRRYTRRKNRICYLQEIFSNEMAKVDDSFFHRLEESFLVEEDKKHERHPIFGNIVDEVAYHEKYPTIYHLRKKLVDSTDKADLRLIYLALAHMIKFRGHFLIEGDLNPDNSDVDKLFIQLVQTYNQLFEENPINASGVDAKAILSARLSKSRRLENLIAQLPGEKKNGLFGNLIALSLGLTPNFKSNFDLAEDAKLQLSKDTYDDDLDNLLAQIGDQYADLFLAAKNLSDAILLSDILRVNTEITKAPLSASMIKRYDEHHQDLTLLKALVRQQLPEKYKEIFFDQSKNGYAGYIDGGASQEEFYKFIKPILEKMDGTEELLVKLNREDLLRKQRTFDNGSIPHQIHLGELHAILRRQEDFYPFLKDNREKIEKILTFRIPYYVGPLARGNSRFAWMTRKSEETITPWNFEEVVDKGASAQSFIERMTNFDKNLPNEKVLPKHSLLYEYFTVYNELTKVKYVTEGMRKPAFLSGEQKKAIVDLLFKTNRKVTVKQLKEDYFKKIECFDSVEISGVEDRFNASLGTYHDLLKIIKDKDFLDNEENEDILEDIVLTLTLFEDREMIEERLKTYAHLFDDKVMKQLKRRRYTGWGRLSRKLINGIRDKQSGKTILDFLKSDGFANRNFMQLIHDDSLTFKEDIQKAQVSGQGDSLHEHIANLAGSPAIKKGILQTVKVVDELVKVMGRHKPENIVIEMARENQTTQKGQKNSRERMKRIEEGIKELGSQILKEHPVENTQLQNEKLYLYYLQNGRDMYVDQELDINRLSDYDVDHIVPQSFLKDDSIDNKVLTRSDKNRGKSDNVPSEEVVKKMKNYWRQLLNAKLITQRKFDNLTKAERGGLSELDKAGFIKRQLVETRQITKHVAQILDSRMNTKYDENDKLIREVKVITLKSKLVSDFRKDFQFYKVREINNYHHAHDAYLNAVVGTALIKKYPKLESEFVYGDYKVYDVRKMIAKSEQEIGKATAKYFFYSNIMNFFKTEITLANGEIRKRPLIETNGETGEIVWDKGRDFATVRKVLSMPQVNIVKKTEVQTGGFSKESILPKRNSDKLIARKKDWDPKKYGGFDSPTVAYSVLVVAKVEKGKSKKLKSVKELLGITIMERSSFEKNPIDFLEAKGYKEVKKDLIIKLPKYSLFELENGRKRMLASAGELQKGNELALPSKYVNFLYLASHYEKLKGSPEDNEQKQLFVEQHKHYLDEIIEQISEFSKRVILADANLDKVLSAYNKHRDKPIREQAENIIHLFTLTNLGAPAAFKYFDTTIDRKRYTSTKEVLDATLIHQSITGLYETRIDLSQLGGDSGGKRPAATKKAGQAKKKKGS

SEQ ID NO: 85 - DNA, 7147 bp, Artificial Sequence
  Description of Artificial Sequence: Synthetic polynucleotide
aggaaataagagagaaaagaagagtaagaagaaatataagagccaccatggcccccaagaagaagcggaaggtgggcggcagcggcggcagcggccagaccggcaagaagagcgagaagggccccgtgtgctggcggaagcgggtgaagagcgagtacatgcggctgcggcagctgaagcggttccggcgggccgacgaggtgaagagcatgttcagcagcaaccggcagaagatcctggagcggaccgagatcctgaaccaggagtggaagcagcggcgaatccagcccgtgcacatcctgaccagcgtgagcagcctgcggggcacccgggagtgcagcgtgaccagcgacctggacttccccacccaggtgatccccctaaagaccctgaacgccgtggccagcgtgcccatcatgtacagctggagccccctgcagcagaacttcatggtggaggacgagaccgtgctgcacaacatcccctacatgggcgacgaggtgctggaccaggacggcaccttcatcgaggagctgatcaagaactacgacggcaaggtgcacggcgaccgggagtgcggcttcatcaacgacgagatcttcgtggagctggtgaacgccctgggccagtacaacgacgacgacgacgacgacgacggcgacgaccccgaggagcgggaggagaagcagaaggacctggaggaccaccgggacgacaaggagagccggcccccccggaagttccccagcgacaagatcttcgaggccatcagcagcatgttccccgacaagggcaccgccgaggagctgaaggagaagtacaaggagctgaccgagcagcagctgcccggcgccctgccccccgagtgcacccccaacatcgacggccccaacgccaagagcgtgcagcgggagcagagcctgcacagcttccacaccctgttctgccggcggtgcttcaagtacgactgcttcctgcaccccttccacgccacccccaacacctacaagcggaagaacaccgagaccgccctggacaacaagccctgcggcccccagtgctaccagcacctggagggcgccaaggagttcgccgccgccctgaccgccgagcggatcaagaccccccccaagcggcccggcggccggcggcggggccggctgcccaacaacagcagccggcccagcacccccaccatcaacgtgctggagagcaaggacaccgacagcgaccgggaggccggcaccgagaccggcggcgagaacaacgacaaggaggaggaggagaagaaggacgagaccagcagcagcagcgaggccaacagccggtgccagacccccatcaagatgaagcccaacatcgagccccccgagaacgtggagtggagcggcgccgaggccagcatgttccgggtgctgatcggcacctactacgacaacttctgcgccatcgcccggctgatcggcaccaagacctgccggcaggtgtacgagttccgggtgaaggagagcagcatcatcgcccccgcccccgccgaggacgtggacacccccccccggaagaagaagcggaagcaccggctgtgggccgcccactgccggaagatccagctgaagaaggacggcagcagcaaccacgtgtacaactaccagccctgcgaccacccccggcagccctgcgacagcagctgcccctgcgtgatcgcccagaacttctgcgagaagttctgccagtgcagcagcgagtgccagaaccggttccccggctgccggtgcaaggcccagtgcaacaccaagcagtgcccctgctacctggccgtgcgggagtgcgaccccgacctgtgcctgacctgcggcgccgccgaccactgggacagcaagaacgtgagctgcaagaactgcagcatccagcggggcagcaagaagcacctgctgctggcccccagcgacgtggccggctggggcatcttcatcaaggaccccgtgcagaagaacgagttcatcagcgagtactgcggcgagatcatcagccaggacgaggccgaccggcggggcaaggtgtacgacaagtacatgtgcagcttcctgttcaacctgaacaacgacttcgtggtggacgccacccggaagggcaacaagatccggttcgccaaccacagcgtgaaccccaactgctacgccaaggtgatgatggtgaacggcgaccaccggatcggcatcttcgccaagcgggccatccagaccggcgaggagctgttcttcgactaccggtacagccaggccgacgccctgaagtacgtgggcatcgagcgggagatggagatccccagcaccggcggcagcggcggcagcggcggcagcggcggcagcggcggcagcggccgacccgacaagaagtacagcatcggcctggccatcggcaccaacagcgtgggctgggccgtgatcaccgacgagtacaaggtgcccagcaagaagttcaaggtgctgggcaacaccgaccggcacagcatcaagaagaacctgatcggcgccctgctgttcgacagcggcgagaccgccgaggccacccggctgaagcggaccgcccggcggcggtacacccggcggaagaaccggatctgctacctgcaggagatcttcagcaacgagatggccaaggtggacgacagcttcttccaccggctggaggagagcttcctggtggaggaggacaagaagcacgagcggcaccccatcttcggcaacatcgtggacgaggtggcctaccacgagaagtaccccaccatctaccacctgcggaagaagctggtggacagcaccgacaaggccgacctgcggctgatctacctggccctggcccacatgatcaagttccggggccacttcctgatcgagggcgacctgaaccccgacaacagcgacgtggacaagctgttcatccagctggtgcagacctacaaccagctgttcgaggagaaccccatcaacgccagcggcgtggacgccaaggccatcctgagcgcccggctgagcaagagccggcggctggagaacctgatcgcccagctgcccggcgagaagaagaacggcctgttcggcaacctgatcgccctgagcctgggcctgacccccaacttcaagagcaacttcgacctggccgaggacgccaagctgcagctgagcaaggacacctacgacgacgacctggacaacctgctggcccagatcggcgaccagtacgccgacctgttcctggccgccaagaacctgagcgacgccatcctgctgagcgacatcctgcgggtgaacaccgagatcaccaaggcccccctgagcgccagcatgatcaagcggtacgacgagcaccaccaggacctgaccctgctgaaggccctggtgcggcagcagctgcccgagaagtacaaggagatcttcttcgaccagagcaagaacggctacgccggctacatcgacggcggcgccagccaggaggagttctacaagttcatcaagcccatcctggagaagatggacggcaccgaggagctgctggtgaagctgaaccgggaggacctgctgcggaagcagcggaccttcgacaacggcagcatcccccaccagatccacctgggcgagctgcacgccatcctgcggcggcaggaggacttctaccccttcctgaaggacaaccgggagaagatcgagaagatcctgaccttccggatcccctactacgtgggccccctggcccggggcaacagccggttcgcctggatgacccggaaatccgaggagaccatcaccccctggaacttcgaggaggtggtggacaagggcgccagcgcccagagcttcatcgagcggatgaccaacttcgacaagaacctgcccaacgagaaggtgctgcccaagcacagcctgctgtacgagtacttcaccgtgtacaacgagctgaccaaggtgaagtacgtgaccgagggcatgcggaagcccgccttcctgagcggcgagcagaagaaggccatcgtggacctgctgttcaagaccaaccggaaggtgaccgtgaagcagctgaaggaggactacttcaagaagatcgagtgcttcgacagcgtggagatcagcggcgtggaggaccggttcaacgccagcctgggcacctaccacgacctgctgaagatcatcaaggacaaggacttcctggacaacgaggagaacgaggacatcctggaggacatcgtgctgaccctgaccctgttcgaggaccgggagatgatcgaggagcggctgaaaacctacgcccacctgttcgacgacaaggtgatgaagcagctgaagcggcggcggtacaccggctggggccggctgagccggaagctgatcaacggcatccgggacaagcagagcggcaagaccatcctggacttcctgaaatccgacggcttcgccaaccggaacttcatgcagctgatccacgacgacagcctgaccttcaaggaggacatccagaaggcccaggtgagcggccagggcgacagcctgcacgagcacatcgccaacctggccggcagccccgccatcaagaagggcatcctgcagaccgtgaaggtggtggacgagctggtgaaggtgatgggccggcacaagcccgagaacatcgtgatcgagatggcccgggagaaccagaccacccagaagggccagaagaacagccgggagcggatgaagcggatcgaggagggcatcaaggagctgggcagccagatcctgaaggagcaccccgtggagaacacccagctgcagaacgagaagctgtacctgtactacctgcagaacggccgggacatgtacgtggaccaggagctggacatcaaccggctgagcgactacgacgtggccgccatcgtgccccagagcttcctgaaggacgacagcatcgacaacaaggtgctgacccggagcgacaaggcccggggcaagagcgacaacgtgcccagcgaggaggtggtgaagaagatgaagaactactggcggcagctgctgaacgccaagctgatcacccagcggaagttcgacaacctgaccaaggccgagcggggcggcctgagcgagctggacaaggccggcttcatcaagcggcagctggtggagacccggcagatcaccaagcacgtggcccagatcctggacagccggatgaacaccaagtacgacgagaacgacaagctgatccgggaggtgaaggtgatcaccctgaaatccaagctggtgagcgacttccggaaggacttccagttctacaaggtgcgggagatcaacaactaccaccacgcccacgacgcctacctgaacgccgtggtgggcaccgccctgatcaagaagtaccccaagctggagagcgagttcgtgtacggcgactacaaggtgtacgacgtgcggaagatgatcgccaagagcgagcaggagatcggcaaggccaccgccaagtacttcttctacagcaacatcatgaacttcttcaagaccgagatcaccctggccaacggcgagatccggaagcggcccctgatcgagaccaacggcgagaccggcgagatcgtgtgggacaagggccgggacttcgccaccgtgcggaaggtgctgagcatgccccaggtgaacatcgtgaagaaaaccgaggtgcagaccggcggcttcagcaaggagagcatcctgcccaagcggaacagcgacaagctgatcgcccggaagaaggactgggaccccaagaagtacggcggcttcgacagccccaccgtggcctacagcgtgctggtggtggccaaggtggagaagggcaagagcaagaagctgaaatccgtgaaggagctgctgggcatcaccatcatggagcggagcagcttcgagaagaaccccatcgacttcctggaggccaagggctacaaggaggtgaagaaggacctgatcatcaagctgcccaagtacagcctgttcgagctggagaacggccggaagcggatgctggccagcgccggcgagctgcagaagggcaacgagctggccctgcccagcaagtacgtgaacttcctgtacctggccagccactacgagaagctgaagggcagccccgaggacaacgagcagaagcagctgttcgtggagcagcacaagcactacctggacgagatcatcgagcagatcagcgagttcagcaagcgggtgatcctggccgacgccaacctggacaaggtgctgagcgcctacaacaagcaccgggacaagcccatccgggagcaggccgagaacatcatccacctgttcaccctgaccaacctgggcgcccccgccgccttcaagtacttcgacaccaccatcgaccggaagcggtacaccagcaccaaggaggtgctggacgccaccctgatccaccagagcatcaccggcctgtacgagacccggatcgacctgagccagctgggcggcgacagcggcggcaagcggcccgccgccaccaagaaggccggccaggccaagaagaagaagtcgggcgggggtggctcagacgctaagtctctgaccgcttggagcagaacactggtcaccttcaaggacgtgttcgtcgacttcacaagagaggagtggaaactgctggacaccgcccagcagatcctctatagaaacgtcatgctggagaactacaagaatctggtgtctctgggctaccagctgaccaagcccgacgtgattctgaggctggagaagggcgaggagccttggctggtggagagagagatccaccaagaaacccaccccgacagcgaaaccgccttcgagatcaagagcagcgtgggaggtggcggatcgggaaagcggcccgccgccaccaagaaggccggtcaggccaagaagaagaagggcagctacccctacgacgtgcccgactacgcctgagcggccgcttaattaagctgccttctgcggggcttgccttctggccatgcccttcttctctcccttgcacctgtacctcttggtctttgaataaagcctgagtaggaagtctagaaaaaaaaaaaaaaaaaaaaaaaaaaaaaaaaaaaaaaaaaaaaaaaaaaaaaaaaaaaaaaaaaaaaaaaaaaaaaaaa

SEQ ID NO: 86 - protein, 2301 aa, Artificial Sequence
  Description of Artificial Sequence: Synthetic polypeptide
MAPKKKRKVGGSGGSGQTGKKSEKGPVCWRKRVKSEYMRLRQLKRFRRADEVKSMFSSNRQKILERTEILNQEWKQRRIQPVHILTSVSSLRGTRECSVTSDLDFPTQVIPLKTLNAVASVPIMYSWSPLQQNFMVEDETVLHNIPYMGDEVLDQDGTFIEELIKNYDGKVHGDRECGFINDEIFVELVNALGQYNDDDDDDDGDDPEEREEKQKDLEDHRDDKESRPPRKFPSDKIFEAISSMFPDKGTAEELKEKYKELTEQQLPGALPPECTPNIDGPNAKSVQREQSLHSFHTLFCRRCFKYDCFLHPFHATPNTYKRKNTETALDNKPCGPQCYQHLEGAKEFAAALTAERIKTPPKRPGGRRRGRLPNNSSRPSTPTINVLESKDTDSDREAGTETGGENNDKEEEEKKDETSSSSEANSRCQTPIKMKPNIEPPENVEWSGAEASMFRVLIGTYYDNFCAIARLIGTKTCRQVYEFRVKESSIIAPAPAEDVDTPPRKKKRKHRLWAAHCRKIQLKKDGSSNHVYNYQPCDHPRQPCDSSCPCVIAQNFCEKFCQCSSECQNRFPGCRCKAQCNTKQCPCYLAVRECDPDLCLTCGAADHWDSKNVSCKNCSIQRGSKKHLLLAPSDVAGWGIFIKDPVQKNEFISEYCGEIISQDEADRRGKVYDKYMCSFLFNLNNDFVVDATRKGNKIRFANHSVNPNCYAKVMMVNGDHRIGIFAKRAIQTGEELFFDYRYSQADALKYVGIEREMEIPSTGGSGGSGGSGGSGGSGRPDKKYSIGLAIGTNSVGWAVITDEYKVPSKKFKVLGNTDRHSIKKNLIGALLFDSGETAEATRLKRTARRRYTRRKNRICYLQEIFSNEMAKVDDSFFHRLEESFLVEEDKKHERHPIFGNIVDEVAYHEKYPTIYHLRKKLVDSTDKADLRLIYLALAHMIKFRGHFLIEGDLNPDNSDVDKLFIQLVQTYNQLFEENPINASGVDAKAILSARLSKSRRLENLIAQLPGEKKNGLFGNLIALSLGLTPNFKSNFDLAEDAKLQLSKDTYDDDLDNLLAQIGDQYADLFLAAKNLSDAILLSDILRVNTEITKAPLSASMIKRYDEHHQDLTLLKALVRQQLPEKYKEIFFDQSKNGYAGYIDGGASQEEFYKFIKPILEKMDGTEELLVKLNREDLLRKQRTFDNGSIPHQIHLGELHAILRRQEDFYPFLKDNREKIEKILTFRIPYYVGPLARGNSRFAWMTRKSEETITPWNFEEVVDKGASAQSFIERMTNFDKNLPNEKVLPKHSLLYEYFTVYNELTKVKYVTEGMRKPAFLSGEQKKAIVDLLFKTNRKVTVKQLKEDYFKKIECFDSVEISGVEDRFNASLGTYHDLLKIIKDKDFLDNEENEDILEDIVLTLTLFEDREMIEERLKTYAHLFDDKVMKQLKRRRYTGWGRLSRKLINGIRDKQSGKTILDFLKSDGFANRNFMQLIHDDSLTFKEDIQKAQVSGQGDSLHEHIANLAGSPAIKKGILQTVKVVDELVKVMGRHKPENIVIEMARENQTTQKGQKNSRERMKRIEEGIKELGSQILKEHPVENTQLQNEKLYLYYLQNGRDMYVDQELDINRLSDYDVAAIVPQSFLKDDSIDNKVLTRSDKARGKSDNVPSEEVVKKMKNYWRQLLNAKLITQRKFDNLTKAERGGLSELDKAGFIKRQLVETRQITKHVAQILDSRMNTKYDENDKLIREVKVITLKSKLVSDFRKDFQFYKVREINNYHHAHDAYLNAVVGTALIKKYPKLESEFVYGDYKVYDVRKMIAKSEQEIGKATAKYFFYSNIMNFFKTEITLANGEIRKRPLIETNGETGEIVWDKGRDFATVRKVLSMPQVNIVKKTEVQTGGFSKESILPKRNSDKLIARKKDWDPKKYGGFDSPTVAYSVLVVAKVEKGKSKKLKSVKELLGITIMERSSFEKNPIDFLEAKGYKEVKKDLIIKLPKYSLFELENGRKRMLASAGELQKGNELALPSKYVNFLYLASHYEKLKGSPEDNEQKQLFVEQHKHYLDEIIEQISEFSKRVILADANLDKVLSAYNKHRDKPIREQAENIIHLFTLTNLGAPAAFKYFDTTIDRKRYTSTKEVLDATLIHQSITGLYETRIDLSQLGGDSGGKRPAATKKAGQAKKKKSGGGGSDAKSLTAWSRTLVTFKDVFVDFTREEWKLLDTAQQILYRNVMLENYKNLVSLGYQLTKPDVILRLEKGEEPWLVEREIHQETHPDSETAFEIKSSVGGGGSGKRPAATKKAGQAKKKKGSYPYDVPDYA

SEQ ID NO: 87-200 - skipped (114 entries)

SEQ ID NO: 201 - DNA, 7433 bp, Artificial Sequence
  Description of Artificial Sequence: Synthetic polynucleotide
tcgcgcgtttcggtgatgacggtgaaaacctctgacacatgcagctcccggagacggtcacagcttgtctgtaagcggatgccgggagcagacaagcccgtcagggcgcgtcagcgggtgttggcgggtgtcggggctggcttaactatgcggcatcagagcagattgtactgagagtgcaccatatgcggtgtgaaataccgcacagatgcgtaaggagaaaataccgcatcaggcgccattcgccattcaggctgcgcaactgttgggaagggcgatcggtgcgggcctcttcgctattacgccagctggcgaaagggggatgtgctgcaaggcgattaagttgggtaacgccagggttttcccagtcacgacgttgtaaaacgacggccagtgaattgacgcgtattgggatggtacctaatacgactcactataaggaaataagagagaaaagaagagtaagaagaaatataagagccaccatggcccccaagaagaagcggaaggtgggcatccacggcgtgcccgccgccgccaagcggaactacatcctgggcctggccatcggcatcaccagcgtgggctacggcatcatcgactacgagacccgggacgtgatcgacgccggcgtgcggctgttcaaggaggccaacgtggagaacaacgagggccggcggagcaagcggggcgcccggcggctgaagcggcggcggcggcaccggatccagcgggtgaagaagctgctgttcgactacaacctgctgaccgaccacagcgagctgagcggcatcaacccctacgaggcccgggtgaagggcctgagccagaagctgagcgaggaggagttcagcgccgccctgctgcacctggccaagcggcggggcgtgcacaacgtgaacgaggtggaggaggacaccggcaacgagctgagcaccaaggagcagatcagccggaacagcaaggccctggaggagaagtacgtggccgagctgcagctggagcggctgaagaaggacggcgaggtgcggggcagcatcaaccggttcaagaccagcgactacgtgaaggaggccaagcagctgctgaaggtgcagaaggcctaccaccagctggaccagagcttcatcgacacctacatcgacctgctggagacccggcggacctactacgagggccccggcgagggcagccccttcggctggaaggacatcaaggagtggtacgagatgctgatgggccactgcacctacttccccgaggagctgcggagcgtgaagtacgcctacaacgccgacctgtacaacgccctgaacgacctgaacaacctggtgatcacccgggacgagaacgagaagctggagtactacgagaagttccagatcatcgagaacgtgttcaagcagaagaagaagcccaccctgaagcagatcgccaaggagatcctggtgaacgaggaggacatcaagggctaccgggtgaccagcaccggcaagcccgagttcaccaacctgaaggtgtaccacgacatcaaggacatcaccgcccggaaggagatcatcgagaacgccgagctgctggaccagatcgccaagatcctgaccatctaccagagcagcgaggacatccaggaggagctgaccaacctgaacagcgagctgacccaggaggagatcgagcagatcagcaacctgaagggctacaccggcacccacaacctgagcctgaaggccatcaacctgatcctggacgagctgtggcacaccaacgacaaccagatcgccatcttcaaccggctgaagctggtgcccaagaaggtggacctgagccagcagaaggagatccccaccaccctggtggacgacttcatcctgagccccgtggtgaagcggagcttcatccagagcatcaaggtgatcaacgccatcatcaagaagtacggcctgcccaacgacatcatcatcgagctggcccgggagaagaacagcaaggacgcccagaagatgatcaacgagatgcagaagcggaaccggcagaccaacgagcggatcgaggagatcatccggaccaccggcaaggagaacgccaagtacctgatcgagaagatcaagctgcacgacatgcaggagggcaagtgcctgtacagcctggaggccatccccctggaggacctgctgaacaaccccttcaactacgaggtggacgccatcatcccccggagcgtgagcttcgacaacagcttcaacaacaaggtgctggtgaagcaggaggagaacagcaagaagggcaaccggacccccttccagtacctgagcagcagcgacagcaagatcagctacgagaccttcaagaagcacatcctgaacctggccaagggcaagggccggatcagcaagaccaagaaggagtacctgctggaggagcgggacatcaaccggttcagcgtgcagaaggacttcatcaaccggaacctggtggacacccggtacgccacccggggcctgatgaacctgctgcggagctacttccgggtgaacaacctggacgtgaaggtgaaatccatcaacggcggcttcaccagcttcctgcggcggaagtggaagttcaagaaggagcggaacaagggctacaagcaccacgccgaggacgccctgatcatcgccaacgccgacttcatcttcaaggagtggaagaagctggacaaggccaagaaggtgatggagaaccagatgttcgaggagaagcaggccgagagcatgcccgagatcgagaccgagcaggagtacaaggagatcttcatcaccccccaccagatcaagcacatcaaggacttcaaggactacaagtacagccaccgggtggacaagaagcccaaccggaagctgatcaacgacaccctgtacagcacccggaaggacgacaagggcaacaccctgatcgtgaacaacctgaacggcctgtacgacaaggacaacgacaagctgaagaagctgatcaacaagagccccgagaagctgctgatgtaccaccacgacccccagacctaccagaagctgaagctgatcatggagcagtacggcgacgagaagaaccccctgtacaagtactacgaggagaccggcaactacctgaccaagtacagcaagaaggacaacggccccgtgatcaagaagatcaagtactacggcaacaagctgaacgcccacctggacatcaccgacgactaccccaacagccggaacaaggtggtgaagctgagcctgaagccctaccggttcgacgtgtacctggacaacggcgtgtacaagttcgtgaccgtgaagaacctggacgtgatcaagaaggagaactactacgaggtgaacagcaagtgctacgaggaggccaagaagctgaagaagatcagcaaccaggccgagttcatcgccagcttctacaagaacgacctgatcaagatcaacggcgagctgtaccgggtgatcggcgtgaacaacgacctgctgaaccggatcgaggtgaacatgatcgacatcacctaccgggagtacctggagaacatgaacgacaagcggcccccccacatcatcaagaccatcgccagcaagacccagagcatcaagaagtacagcaccgacatcctgggcaacctgtacgaggtgaaatccaagaagcacccccagatcatcaagaagggcaagcggcccgccgccaccaagaaggccggccaggccaagaagaagaaggcccgggacagcaaggtggagaacaagaccaagaagctgcgggtgttcgaggccttcgccggcatcggcgcccagcggaaggccctggagaaggtgcggaaggacgagtacgagatcgtgggcctggccgagtggtacgtgcccgccatcgtgatgtaccaggccatccacaacaacttccacaccaagctggagtacaagagcgtgagccgggaggagatgatcgactacctggagaacaagaccctgagctggaacagcaagaaccccgtgagcaacggctactggaagcggaagaaggacgacgagctgaagatcatctacaacgccatcaagctgagcgagaaggagggcaacatcttcgacatccgggacctgtacaagcggaccctgaagaacatcgacctgctgacctacagcttcccctgccaggacctgagccagcagggcatccagaagggcatgaagcggggcagcggcacccggagcggcctgctgtgggagatcgagcgggccctggacagcaccgagaagaacgacctgcccaagtacctgctgatggagaacgtgggcgccctgctgcacaagaagaacgaggaggagctgaaccagtggaagcagaagctggagagcctgggctaccagaacagcatcgaggtgctgaacgccgccgacttcggcagcagccaggcccggcggcgggtgttcatgatcagcaccctgaacgagttcgtggagctgcccaagggcgacaagaagcccaagagcatcaagaaggtgctgaacaagatcgtgagcgagaaggacatcctgaacaacctgctgaagtacaacctgaccgagttcaagaaaaccaagagcaacatcaacaaggccagcctgatcggctacagcaagttcaacagcgagggctacgtgtacgaccccgagttcaccggccccaccctgaccgccagcggcgccaacagccggatcaagatcaaggacggcagcaacatccggaagatgaacagcgacgagaccttcctgtacatcggcttcgacagccaggacggcaagcgggtgaacgagatcgagttcctgaccgagaaccagaagatcttcgtgtgcggcaacagcatcagcgtggaggtgctggaggccatcatcgacaagatcggcggccccagcagcggcggcaagcggcccgccgccaccaagaaggccggccaggccaagaagaagaagggcagctacccctacgacgtgcccgactacgcctgagcggccgcttaattaagctgccttctgcggggcttgccttctggccatgcccttcttctctcccttgcacctgtacctcttggtctttgaataaagcctgagtaggaagtctagaaaaaaaaaaaaaaaaaaaaaaaaaaaaaaaaaaaaaaaaaaaaaaaaaaaaaaaaaaaaaaaaaaaaaaaaaaaaaaaattgtcttcttcatcgcctgcagatcccaatggcgcgccgagcttggctcgagcatggtcatagctgtttcctgtgtgaaattgttatccgctcacaattccacacaacatacgagccggaagcataaagtgtaaagcctggggtgcctaatgagtgagctaactcacattaattgcgttgcgctcactgcccgctttccagtcgggaaacctgtcgtgccagctgcattaatgaatcggccaacgcgcggggagaggcggtttgcgtattgggcgctcttccgcttcctcgctcactgactcgctgcgctcggtcgttcggctgcggcgagcggtatcagctcactcaaaggcggtaatacggttatccacagaatcaggggataacgcaggaaagaacatgtgagcaaaaggccagcaaaaggccaggaaccgtaaaaaggccgcgttgctggcgtttttccataggctccgcccccctgacgagcatcacaaaaatcgacgctcaagtcagaggtggcgaaacccgacaggactataaagataccaggcgtttccccctggaagctccctcgtgcgctctcctgttccgaccctgccgcttaccggatacctgtccgcctttctcccttcgggaagcgtggcgctttctcatagctcacgctgtaggtatctcagttcggtgtaggtcgttcgctccaagctgggctgtgtgcacgaaccccccgttcagcccgaccgctgcgccttatccggtaactatcgtcttgagtccaacccggtaagacacgacttatcgccactggcagcagccactggtaacaggattagcagagcgaggtatgtaggcggtgctacagagttcttgaagtggtggcctaactacggctacactagaagaacagtatttggtatctgcgctctgctgaagccagttaccttcggaaaaagagttggtagctcttgatccggcaaacaaaccaccgctggtagcggtggtttttttgtttgcaagcagcagattacgcgcagaaaaaaaggatctcaagaagatcctttgatcttttctacggggtctgacgctcagtggaacgaaaactcacgttaagggattttggtcatgagattatcaaaaaggatcttcacctagatccttttaaattaaaaatgaagttttaaatcaatctaaagtatatatgagtaaacttggtctgacagttagaaaaactcatcgagcatcaaatgaaactgcaatttattcatatcaggattatcaataccatatttttgaaaaagccgtttctgtaatgaaggagaaaactcaccgaggcagttccataggatggcaagatcctggtatcggtctgcgattccgactcgtccaacatcaatacaacctattaatttcccctcgtcaaaaataaggttatcaagtgagaaatcaccatgagtgacgactgaatccggtgagaatggcaaaagtttatgcatttctttccagacttgttcaacaggccagccattacgctcgtcatcaaaatcactcgcatcaaccaaaccgttattcattcgtgattgcgcctgagcgagacgaaatacgcgatcgctgttaaaaggacaattacaaacaggaatcgaatgcaaccggcgcaggaacactgccagcgcatcaacaatattttcacctgaatcaggatattcttctaatacctggaatgctgttttcccagggatcgcagtggtgagtaaccatgcatcatcaggagtacggataaaatgcttgatggtcggaagaggcataaattccgtcagccagtttagtctgaccatctcatctgtaacatcattggcaacgctacctttgccatgtttcagaaacaactctggcgcatcgggcttcccatacaatcgatagattgtcgcacctgattgcccgacattatcgcgagcccatttatacccatataaatcagcatccatgttggaatttaatcgcggcctagagcaagacgtttcccgttgaatatggctcatactcttcctttttcaatattattgaagcatttatcagggttattgtctcatgagcggatacatatttgaatgtatttagaaaaataaacaaataggggttccgcgcacatttccccgaaaagtgccacctgacgtctaagaaaccattattatcatgacattaacctataaaaataggcgtatcacgaggccctttcgtc

SEQ ID NO: 202 - DNA, 4762 bp, Artificial Sequence
  Description of Artificial Sequence: Synthetic polynucleotide
aggaaataagagagaaaagaagagtaagaagaaatataagagccaccatggcccccaagaagaagcggaaggtgggcatccacggcgtgcccgccgccgccaagcggaactacatcctgggcctggccatcggcatcaccagcgtgggctacggcatcatcgactacgagacccgggacgtgatcgacgccggcgtgcggctgttcaaggaggccaacgtggagaacaacgagggccggcggagcaagcggggcgcccggcggctgaagcggcggcggcggcaccggatccagcgggtgaagaagctgctgttcgactacaacctgctgaccgaccacagcgagctgagcggcatcaacccctacgaggcccgggtgaagggcctgagccagaagctgagcgaggaggagttcagcgccgccctgctgcacctggccaagcggcggggcgtgcacaacgtgaacgaggtggaggaggacaccggcaacgagctgagcaccaaggagcagatcagccggaacagcaaggccctggaggagaagtacgtggccgagctgcagctggagcggctgaagaaggacggcgaggtgcggggcagcatcaaccggttcaagaccagcgactacgtgaaggaggccaagcagctgctgaaggtgcagaaggcctaccaccagctggaccagagcttcatcgacacctacatcgacctgctggagacccggcggacctactacgagggccccggcgagggcagccccttcggctggaaggacatcaaggagtggtacgagatgctgatgggccactgcacctacttccccgaggagctgcggagcgtgaagtacgcctacaacgccgacctgtacaacgccctgaacgacctgaacaacctggtgatcacccgggacgagaacgagaagctggagtactacgagaagttccagatcatcgagaacgtgttcaagcagaagaagaagcccaccctgaagcagatcgccaaggagatcctggtgaacgaggaggacatcaagggctaccgggtgaccagcaccggcaagcccgagttcaccaacctgaaggtgtaccacgacatcaaggacatcaccgcccggaaggagatcatcgagaacgccgagctgctggaccagatcgccaagatcctgaccatctaccagagcagcgaggacatccaggaggagctgaccaacctgaacagcgagctgacccaggaggagatcgagcagatcagcaacctgaagggctacaccggcacccacaacctgagcctgaaggccatcaacctgatcctggacgagctgtggcacaccaacgacaaccagatcgccatcttcaaccggctgaagctggtgcccaagaaggtggacctgagccagcagaaggagatccccaccaccctggtggacgacttcatcctgagccccgtggtgaagcggagcttcatccagagcatcaaggtgatcaacgccatcatcaagaagtacggcctgcccaacgacatcatcatcgagctggcccgggagaagaacagcaaggacgcccagaagatgatcaacgagatgcagaagcggaaccggcagaccaacgagcggatcgaggagatcatccggaccaccggcaaggagaacgccaagtacctgatcgagaagatcaagctgcacgacatgcaggagggcaagtgcctgtacagcctggaggccatccccctggaggacctgctgaacaaccccttcaactacgaggtggacgccatcatcccccggagcgtgagcttcgacaacagcttcaacaacaaggtgctggtgaagcaggaggagaacagcaagaagggcaaccggacccccttccagtacctgagcagcagcgacagcaagatcagctacgagaccttcaagaagcacatcctgaacctggccaagggcaagggccggatcagcaagaccaagaaggagtacctgctggaggagcgggacatcaaccggttcagcgtgcagaaggacttcatcaaccggaacctggtggacacccggtacgccacccggggcctgatgaacctgctgcggagctacttccgggtgaacaacctggacgtgaaggtgaaatccatcaacggcggcttcaccagcttcctgcggcggaagtggaagttcaagaaggagcggaacaagggctacaagcaccacgccgaggacgccctgatcatcgccaacgccgacttcatcttcaaggagtggaagaagctggacaaggccaagaaggtgatggagaaccagatgttcgaggagaagcaggccgagagcatgcccgagatcgagaccgagcaggagtacaaggagatcttcatcaccccccaccagatcaagcacatcaaggacttcaaggactacaagtacagccaccgggtggacaagaagcccaaccggaagctgatcaacgacaccctgtacagcacccggaaggacgacaagggcaacaccctgatcgtgaacaacctgaacggcctgtacgacaaggacaacgacaagctgaagaagctgatcaacaagagccccgagaagctgctgatgtaccaccacgacccccagacctaccagaagctgaagctgatcatggagcagtacggcgacgagaagaaccccctgtacaagtactacgaggagaccggcaactacctgaccaagtacagcaagaaggacaacggccccgtgatcaagaagatcaagtactacggcaacaagctgaacgcccacctggacatcaccgacgactaccccaacagccggaacaaggtggtgaagctgagcctgaagccctaccggttcgacgtgtacctggacaacggcgtgtacaagttcgtgaccgtgaagaacctggacgtgatcaagaaggagaactactacgaggtgaacagcaagtgctacgaggaggccaagaagctgaagaagatcagcaaccaggccgagttcatcgccagcttctacaagaacgacctgatcaagatcaacggcgagctgtaccgggtgatcggcgtgaacaacgacctgctgaaccggatcgaggtgaacatgatcgacatcacctaccgggagtacctggagaacatgaacgacaagcggcccccccacatcatcaagaccatcgccagcaagacccagagcatcaagaagtacagcaccgacatcctgggcaacctgtacgaggtgaaatccaagaagcacccccagatcatcaagaagggcaagcggcccgccgccaccaagaaggccggccaggccaagaagaagaaggcccgggacagcaaggtggagaacaagaccaagaagctgcgggtgttcgaggccttcgccggcatcggcgcccagcggaaggccctggagaaggtgcggaaggacgagtacgagatcgtgggcctggccgagtggtacgtgcccgccatcgtgatgtaccaggccatccacaacaacttccacaccaagctggagtacaagagcgtgagccgggaggagatgatcgactacctggagaacaagaccctgagctggaacagcaagaaccccgtgagcaacggctactggaagcggaagaaggacgacgagctgaagatcatctacaacgccatcaagctgagcgagaaggagggcaacatcttcgacatccgggacctgtacaagcggaccctgaagaacatcgacctgctgacctacagcttcccctgccaggacctgagccagcagggcatccagaagggcatgaagcggggcagcggcacccggagcggcctgctgtgggagatcgagcgggccctggacagcaccgagaagaacgacctgcccaagtacctgctgatggagaacgtgggcgccctgctgcacaagaagaacgaggaggagctgaaccagtggaagcagaagctggagagcctgggctaccagaacagcatcgaggtgctgaacgccgccgacttcggcagcagccaggcccggcggcgggtgttcatgatcagcaccctgaacgagttcgtggagctgcccaagggcgacaagaagcccaagagcatcaagaaggtgctgaacaagatcgtgagcgagaaggacatcctgaacaacctgctgaagtacaacctgaccgagttcaagaaaaccaagagcaacatcaacaaggccagcctgatcggctacagcaagttcaacagcgagggctacgtgtacgaccccgagttcaccggccccaccctgaccgccagcggcgccaacagccggatcaagatcaaggacggcagcaacatccggaagatgaacagcgacgagaccttcctgtacatcggcttcgacagccaggacggcaagcgggtgaacgagatcgagttcctgaccgagaaccagaagatcttcgtgtgcggcaacagcatcagcgtggaggtgctggaggccatcatcgacaagatcggcggccccagcagcggcggcaagcggcccgccgccaccaagaaggccggccaggccaagaagaagaagggcagctacccctacgacgtgcccgactacgcctgagcggccgcttaattaagctgccttctgcggggcttgccttctggccatgcccttcttctctcccttgcacctgtacctcttggtctttgaataaagcctgagtaggaagtctagaaaaaaaaaaaaaaaaaaaaaaaaaaaaaaaaaaaaaaaaaaaaaaaaaaaaaaaaaaaaaaaaaaaaaaaaaaaaaaaa

SEQ ID NO: 203 - protein, 1506 aa, Artificial Sequence
  Description of Artificial Sequence: Synthetic polypeptide
MAPKKKRKVGIHGVPAAAKRNYILGLAIGITSVGYGIIDYETRDVIDAGVRLFKEANVENNEGRRSKRGARRLKRRRRHRIQRVKKLLFDYNLLTDHSELSGINPYEARVKGLSQKLSEEEFSAALLHLAKRRGVHNVNEVEEDTGNELSTKEQISRNSKALEEKYVAELQLERLKKDGEVRGSINRFKTSDYVKEAKQLLKVQKAYHQLDQSFIDTYIDLLETRRTYYEGPGEGSPFGWKDIKEWYEMLMGHCTYFPEELRSVKYAYNADLYNALNDLNNLVITRDENEKLEYYEKFQIIENVFKQKKKPTLKQIAKEILVNEEDIKGYRVTSTGKPEFTNLKVYHDIKDITARKEIIENAELLDQIAKILTIYQSSEDIQEELTNLNSELTQEEIEQISNLKGYTGTHNLSLKAINLILDELWHTNDNQIAIFNRLKLVPKKVDLSQQKEIPTTLVDDFILSPVVKRSFIQSIKVINAIIKKYGLPNDIIIELAREKNSKDAQKMINEMQKRNRQTNERIEEIIRTTGKENAKYLIEKIKLHDMQEGKCLYSLEAIPLEDLLNNPFNYEVDAIIPRSVSFDNSFNNKVLVKQEENSKKGNRTPFQYLSSSDSKISYETFKKHILNLAKGKGRISKTKKEYLLEERDINRFSVQKDFINRNLVDTRYATRGLMNLLRSYFRVNNLDVKVKSINGGFTSFLRRKWKFKKERNKGYKHHAEDALIIANADFIFKEWKKLDKAKKVMENQMFEEKQAESMPEIETEQEYKEIFITPHQIKHIKDFKDYKYSHRVDKKPNRKLINDTLYSTRKDDKGNTLIVNNLNGLYDKDNDKLKKLINKSPEKLLMYHHDPQTYQKLKLIMEQYGDEKNPLYKYYEETGNYLTKYSKKDNGPVIKKIKYYGNKLNAHLDITDDYPNSRNKVVKLSLKPYRFDVYLDNGVYKFVTVKNLDVIKKENYYEVNSKCYEEAKKLKKISNQAEFIASFYKNDLIKINGELYRVIGVNNDLLNRIEVNMIDITYREYLENMNDKRPPHIIKTIASKTQSIKKYSTDILGNLYEVKSKKHPQIIKKGKRPAATKKAGQAKKKKARDSKVENKTKKLRVFEAFAGIGAQRKALEKVRKDEYEIVGLAEWYVPAIVMYQAIHNNFHTKLEYKSVSREEMIDYLENKTLSWNSKNPVSNGYWKRKKDDELKIIYNAIKLSEKEGNIFDIRDLYKRTLKNIDLLTYSFPCQDLSQQGIQKGMKRGSGTRSGLLWEIERALDSTEKNDLPKYLLMENVGALLHKKNEEELNQWKQKLESLGYQNSIEVLNAADFGSSQARRRVFMISTLNEFVELPKGDKKPKSIKKVLNKIVSEKDILNNLLKYNLTEFKKTKSNINKASLIGYSKFNSEGYVYDPEFTGPTLTASGANSRIKIKDGSNIRKMNSDETFLYIGFDSQDGKRVNEIEFLTENQKIFVCGNSISVEVLEAIIDKIGGPSSGGKRPAATKKAGQAKKKKGSYPYDVPDYA

SEQ ID NO: 204 - DNA, 7499 bp, Artificial Sequence
  Description of Artificial Sequence: Synthetic polynucleotide
tcgcgcgtttcggtgatgacggtgaaaacctctgacacatgcagctcccggagacggtcacagcttgtctgtaagcggatgccgggagcagacaagcccgtcagggcgcgtcagcgggtgttggcgggtgtcggggctggcttaactatgcggcatcagagcagattgtactgagagtgcaccatatgcggtgtgaaataccgcacagatgcgtaaggagaaaataccgcatcaggcgccattcgccattcaggctgcgcaactgttgggaagggcgatcggtgcgggcctcttcgctattacgccagctggcgaaagggggatgtgctgcaaggcgattaagttgggtaacgccagggttttcccagtcacgacgttgtaaaacgacggccagtgaattgacgcgtattgggatggtacctaatacgactcactataaggaaataagagagaaaagaagagtaagaagaaatataagagccaccatggcccccaagaagaagcggaaggtgggcatccacggcgtgcccgccgccgacaagaagtacagcatcggcctggccatcggcaccaacagcgtgggctgggccgtgatcaccgacgagtacaaggtgcccagcaagaagttcaaggtgctgggcaacaccgaccggcacagcatcaagaagaacctgatcggcgccctgctgttcgacagcggcgagaccgccgaggccacccggctgaagcggaccgcccggcggcggtacacccggcggaagaaccggatctgctacctgcaggagatcttcagcaacgagatggccaaggtggacgacagcttcttccaccggctggaggagagcttcctggtggaggaggacaagaagcacgagcggcaccccatcttcggcaacatcgtggacgaggtggcctaccacgagaagtaccccaccatctaccacctgcggaagaagctggtggacagcaccgacaaggccgacctgcggctgatctacctggccctggcccacatgatcaagttccggggccacttcctgatcgagggcgacctgaaccccgacaacagcgacgtggacaagctgttcatccagctggtgcagacctacaaccagctgttcgaggagaaccccatcaacgccagcggcgtggacgccaaggccatcctgagcgcccggctgagcaagagccggcggctggagaacctgatcgcccagctgcccggcgagaagaagaacggcctgttcggcaacctgatcgccctgagcctgggcctgacccccaacttcaagagcaacttcgacctggccgaggacgccaagctgcagctgagcaaggacacctacgacgacgacctggacaacctgctggcccagatcggcgaccagtacgccgacctgttcctggccgccaagaacctgagcgacgccatcctgctgagcgacatcctgcgggtgaacaccgagatcaccaaggcccccctgagcgccagcatgatcaagcggtacgacgagcaccaccaggacctgaccctgctgaaggccctggtgcggcagcagctgcccgagaagtacaaggagatcttcttcgaccagagcaagaacggctacgccggctacatcgacggcggcgccagccaggaggagttctacaagttcatcaagcccatcctggagaagatggacggcaccgaggagctgctggtgaagctgaaccgggaggacctgctgcggaagcagcggaccttcgacaacggcagcatcccccaccagatccacctgggcgagctgcacgccatcctgcggcggcaggaggacttctaccccttcctgaaggacaaccgggagaagatcgagaagatcctgaccttccggatcccctactacgtgggccccctggcccggggcaacagccggttcgcctggatgacccggaaatccgaggagaccatcaccccctggaacttcgaggaggtggtggacaagggcgccagcgcccagagcttcatcgagcggatgaccaacttcgacaagaacctgcccaacgagaaggtgctgcccaagcacagcctgctgtacgagtacttcaccgtgtacaacgagctgaccaaggtgaagtacgtgaccgagggcatgcggaagcccgccttcctgagcggcgagcagaagaaggccatcgtggacctgctgttcaagaccaaccggaaggtgaccgtgaagcagctgaaggaggactacttcaagaagatcgagtgcttcgacagcgtggagatcagcggcgtggaggaccggttcaacgccagcctgggcacctaccacgacctgctgaagatcatcaaggacaaggacttcctggacaacgaggagaacgaggacatcctggaggacatcgtgctgaccctgaccctgttcgaggaccgggagatgatcgaggagcggctgaaaacctacgcccacctgttcgacgacaaggtgatgaagcagctgaagcggcggcggtacaccggctggggccggctgagccggaagctgatcaacggcatccgggacaagcagagcggcaagaccatcctggacttcctgaaatccgacggcttcgccaaccggaacttcatgcagctgatccacgacgacagcctgaccttcaaggaggacatccagaaggcccaggtgagcggccagggcgacagcctgcacgagcacatcgccaacctggccggcagccccgccatcaagaagggcatcctgcagaccgtgaaggtggtggacgagctggtgaaggtgatgggccggcacaagcccgagaacatcgtgatcgagatggcccgggagaaccagaccacccagaagggccagaagaacagccgggagcggatgaagcggatcgaggagggcatcaaggagctgggcagccagatcctgaaggagcaccccgtggagaacacccagctgcagaacgagaagctgtacctgtactacctgcagaacggccgggacatgtacgtggaccaggagctggacatcaaccggctgagcgactacgacgtggccgccatcgtgccccagagcttcctgaaggacgacagcatcgacaacaaggtgctgacccggagcgacaaggcccggggcaagagcgacaacgtgcccagcgaggaggtggtgaagaagatgaagaactactggcggcagctgctgaacgccaagctgatcacccagcggaagttcgacaacctgaccaaggccgagcggggcggcctgagcgagctggacaaggccggcttcatcaagcggcagctggtggagacccggcagatcaccaagcacgtggcccagatcctggacagccggatgaacaccaagtacgacgagaacgacaagctgatccgggaggtgaaggtgatcaccctgaaatccaagctggtgagcgacttccggaaggacttccagttctacaaggtgcgggagatcaacaactaccaccacgcccacgacgcctacctgaacgccgtggtgggcaccgccctgatcaagaagtaccccaagctggagagcgagttcgtgtacggcgactacaaggtgtacgacgtgcggaagatgatcgccaagagcgagcaggagatcggcaaggccaccgccaagtacttcttctacagcaacatcatgaacttcttcaagaccgagatcaccctggccaacggcgagatccggaagcggcccctgatcgagaccaacggcgagaccggcgagatcgtgtgggacaagggccgggacttcgccaccgtgcggaaggtgctgagcatgccccaggtgaacatcgtgaagaaaaccgaggtgcagaccggcggcttcagcaaggagagcatcctgcccaagcggaacagcgacaagctgatcgcccggaagaaggactgggaccccaagaagtacggcggcttcgacagccccaccgtggcctacagcgtgctggtggtggccaaggtggagaagggcaagagcaagaagctgaaatccgtgaaggagctgctgggcatcaccatcatggagcggagcagcttcgagaagaaccccatcgacttcctggaggccaagggctacaaggaggtgaagaaggacctgatcatcaagctgcccaagtacagcctgttcgagctggagaacggccggaagcggatgctggccagcgccggcgagctgcagaagggcaacgagctggccctgcccagcaagtacgtgaacttcctgtacctggccagccactacgagaagctgaagggcagccccgaggacaacgagcagaagcagctgttcgtggagcagcacaagcactacctggacgagatcatcgagcagatcagcgagttcagcaagcgggtgatcctggccgacgccaacctggacaaggtgctgagcgcctacaacaagcaccgggacaagcccatccgggagcaggccgagaacatcatccacctgttcaccctgaccaacctgggcgcccccgccgccttcaagtacttcgacaccaccatcgaccggaagcggtacaccagcaccaaggaggtgctggacgccaccctgatccaccagagcatcaccggcctgtacgagacccggatcgacctgagccagctgggcggcgacaagcggcccgccgccaccaagaaggccggccaggccaagaagaagaaggccagcgacgccaagagcctgaccgcctggagccggaccctggtgaccttcaaggacgtgttcgtggacttcacccgggaggagtggaagctgctggacaccgcccagcagatcctgtaccggaacgtgatgctggagaactacaagaacctggtgagcctgggctaccagctgaccaagcccgacgtgatcctgcggctggagaagggcgaggagccctggctggtggagcgggagatccaccaggagacccaccccgacagcgagaccgccttcgagatcaagagcagcgtgagcggcggcaagcggcccgccgccaccaagaaggccggccaggccaagaagaagaagggcagctacccctacgacgtgcccgactacgcctgagcggccgcttaattaagctgccttctgcggggcttgccttctggccatgcccttcttctctcccttgcacctgtacctcttggtctttgaataaagcctgagtaggaagtctagaaaaaaaaaaaaaaaaaaaaaaaaaaaaaaaaaaaaaaaaaaaaaaaaaaaaaaaaaaaaaaaaaaaaaaaaaaaaaaaattgtcttcttcatcgcctgcagatcccaatggcgcgccgagcttggctcgagcatggtcatagctgtttcctgtgtgaaattgttatccgctcacaattccacacaacatacgagccggaagcataaagtgtaaagcctggggtgcctaatgagtgagctaactcacattaattgcgttgcgctcactgcccgctttccagtcgggaaacctgtcgtgccagctgcattaatgaatcggccaacgcgcggggagaggcggtttgcgtattgggcgctcttccgcttcctcgctcactgactcgctgcgctcggtcgttcggctgcggcgagcggtatcagctcactcaaaggcggtaatacggttatccacagaatcaggggataacgcaggaaagaacatgtgagcaaaaggccagcaaaaggccaggaaccgtaaaaaggccgcgttgctggcgtttttccataggctccgcccccctgacgagcatcacaaaaatcgacgctcaagtcagaggtggcgaaacccgacaggactataaagataccaggcgtttccccctggaagctccctcgtgcgctctcctgttccgaccctgccgcttaccggatacctgtccgcctttctcccttcgggaagcgtggcgctttctcatagctcacgctgtaggtatctcagttcggtgtaggtcgttcgctccaagctgggctgtgtgcacgaaccccccgttcagcccgaccgctgcgccttatccggtaactatcgtcttgagtccaacccggtaagacacgacttatcgccactggcagcagccactggtaacaggattagcagagcgaggtatgtaggcggtgctacagagttcttgaagtggtggcctaactacggctacactagaagaacagtatttggtatctgcgctctgctgaagccagttaccttcggaaaaagagttggtagctcttgatccggcaaacaaaccaccgctggtagcggtggtttttttgtttgcaagcagcagattacgcgcagaaaaaaaggatctcaagaagatcctttgatcttttctacggggtctgacgctcagtggaacgaaaactcacgttaagggattttggtcatgagattatcaaaaaggatcttcacctagatccttttaaattaaaaatgaagttttaaatcaatctaaagtatatatgagtaaacttggtctgacagttagaaaaactcatcgagcatcaaatgaaactgcaatttattcatatcaggattatcaataccatatttttgaaaaagccgtttctgtaatgaaggagaaaactcaccgaggcagttccataggatggcaagatcctggtatcggtctgcgattccgactcgtccaacatcaatacaacctattaatttcccctcgtcaaaaataaggttatcaagtgagaaatcaccatgagtgacgactgaatccggtgagaatggcaaaagtttatgcatttctttccagacttgttcaacaggccagccattacgctcgtcatcaaaatcactcgcatcaaccaaaccgttattcattcgtgattgcgcctgagcgagacgaaatacgcgatcgctgttaaaaggacaattacaaacaggaatcgaatgcaaccggcgcaggaacactgccagcgcatcaacaatattttcacctgaatcaggatattcttctaatacctggaatgctgttttcccagggatcgcagtggtgagtaaccatgcatcatcaggagtacggataaaatgcttgatggtcggaagaggcataaattccgtcagccagtttagtctgaccatctcatctgtaacatcattggcaacgctacctttgccatgtttcagaaacaactctggcgcatcgggcttcccatacaatcgatagattgtcgcacctgattgcccgacattatcgcgagcccatttatacccatataaatcagcatccatgttggaatttaatcgcggcctagagcaagacgtttcccgttgaatatggctcatactcttcctttttcaatattattgaagcatttatcagggttattgtctcatgagcggatacatatttgaatgtatttagaaaaataaacaaataggggttccgcgcacatttccccgaaaagtgccacctgacgtctaagaaaccattattatcatgacattaacctataaaaataggcgtatcacgaggccctttcgtc

SEQ ID NO: 205 - DNA, 4828 bp, Artificial Sequence
  Description of Artificial Sequence: Synthetic polynucleotide
aggaaataagagagaaaagaagagtaagaagaaatataagagccaccatggcccccaagaagaagcggaaggtgggcatccacggcgtgcccgccgccgacaagaagtacagcatcggcctggccatcggcaccaacagcgtgggctgggccgtgatcaccgacgagtacaaggtgcccagcaagaagttcaaggtgctgggcaacaccgaccggcacagcatcaagaagaacctgatcggcgccctgctgttcgacagcggcgagaccgccgaggccacccggctgaagcggaccgcccggcggcggtacacccggcggaagaaccggatctgctacctgcaggagatcttcagcaacgagatggccaaggtggacgacagcttcttccaccggctggaggagagcttcctggtggaggaggacaagaagcacgagcggcaccccatcttcggcaacatcgtggacgaggtggcctaccacgagaagtaccccaccatctaccacctgcggaagaagctggtggacagcaccgacaaggccgacctgcggctgatctacctggccctggcccacatgatcaagttccggggccacttcctgatcgagggcgacctgaaccccgacaacagcgacgtggacaagctgttcatccagctggtgcagacctacaaccagctgttcgaggagaaccccatcaacgccagcggcgtggacgccaaggccatcctgagcgcccggctgagcaagagccggcggctggagaacctgatcgcccagctgcccggcgagaagaagaacggcctgttcggcaacctgatcgccctgagcctgggcctgacccccaacttcaagagcaacttcgacctggccgaggacgccaagctgcagctgagcaaggacacctacgacgacgacctggacaacctgctggcccagatcggcgaccagtacgccgacctgttcctggccgccaagaacctgagcgacgccatcctgctgagcgacatcctgcgggtgaacaccgagatcaccaaggcccccctgagcgccagcatgatcaagcggtacgacgagcaccaccaggacctgaccctgctgaaggccctggtgcggcagcagctgcccgagaagtacaaggagatcttcttcgaccagagcaagaacggctacgccggctacatcgacggcggcgccagccaggaggagttctacaagttcatcaagcccatcctggagaagatggacggcaccgaggagctgctggtgaagctgaaccgggaggacctgctgcggaagcagcggaccttcgacaacggcagcatcccccaccagatccacctgggcgagctgcacgccatcctgcggcggcaggaggacttctaccccttcctgaaggacaaccgggagaagatcgagaagatcctgaccttccggatcccctactacgtgggccccctggcccggggcaacagccggttcgcctggatgacccggaaatccgaggagaccatcaccccctggaacttcgaggaggtggtggacaagggcgccagcgcccagagcttcatcgagcggatgaccaacttcgacaagaacctgcccaacgagaaggtgctgcccaagcacagcctgctgtacgagtacttcaccgtgtacaacgagctgaccaaggtgaagtacgtgaccgagggcatgcggaagcccgccttcctgagcggcgagcagaagaaggccatcgtggacctgctgttcaagaccaaccggaaggtgaccgtgaagcagctgaaggaggactacttcaagaagatcgagtgcttcgacagcgtggagatcagcggcgtggaggaccggttcaacgccagcctgggcacctaccacgacctgctgaagatcatcaaggacaaggacttcctggacaacgaggagaacgaggacatcctggaggacatcgtgctgaccctgaccctgttcgaggaccgggagatgatcgaggagcggctgaaaacctacgcccacctgttcgacgacaaggtgatgaagcagctgaagcggcggcggtacaccggctggggccggctgagccggaagctgatcaacggcatccgggacaagcagagcggcaagaccatcctggacttcctgaaatccgacggcttcgccaaccggaacttcatgcagctgatccacgacgacagcctgaccttcaaggaggacatccagaaggcccaggtgagcggccagggcgacagcctgcacgagcacatcgccaacctggccggcagccccgccatcaagaagggcatcctgcagaccgtgaaggtggtggacgagctggtgaaggtgatgggccggcacaagcccgagaacatcgtgatcgagatggcccgggagaaccagaccacccagaagggccagaagaacagccgggagcggatgaagcggatcgaggagggcatcaaggagctgggcagccagatcctgaaggagcaccccgtggagaacacccagctgcagaacgagaagctgtacctgtactacctgcagaacggccgggacatgtacgtggaccaggagctggacatcaaccggctgagcgactacgacgtggccgccatcgtgccccagagcttcctgaaggacgacagcatcgacaacaaggtgctgacccggagcgacaaggcccggggcaagagcgacaacgtgcccagcgaggaggtggtgaagaagatgaagaactactggcggcagctgctgaacgccaagctgatcacccagcggaagttcgacaacctgaccaaggccgagcggggcggcctgagcgagctggacaaggccggcttcatcaagcggcagctggtggagacccggcagatcaccaagcacgtggcccagatcctggacagccggatgaacaccaagtacgacgagaacgacaagctgatccgggaggtgaaggtgatcaccctgaaatccaagctggtgagcgacttccggaaggacttccagttctacaaggtgcgggagatcaacaactaccaccacgcccacgacgcctacctgaacgccgtggtgggcaccgccctgatcaagaagtaccccaagctggagagcgagttcgtgtacggcgactacaaggtgtacgacgtgcggaagatgatcgccaagagcgagcaggagatcggcaaggccaccgccaagtacttcttctacagcaacatcatgaacttcttcaagaccgagatcaccctggccaacggcgagatccggaagcggcccctgatcgagaccaacggcgagaccggcgagatcgtgtgggacaagggccgggacttcgccaccgtgcggaaggtgctgagcatgccccaggtgaacatcgtgaagaaaaccgaggtgcagaccggcggcttcagcaaggagagcatcctgcccaagcggaacagcgacaagctgatcgcccggaagaaggactgggaccccaagaagtacggcggcttcgacagccccaccgtggcctacagcgtgctggtggtggccaaggtggagaagggcaagagcaagaagctgaaatccgtgaaggagctgctgggcatcaccatcatggagcggagcagcttcgagaagaaccccatcgacttcctggaggccaagggctacaaggaggtgaagaaggacctgatcatcaagctgcccaagtacagcctgttcgagctggagaacggccggaagcggatgctggccagcgccggcgagctgcagaagggcaacgagctggccctgcccagcaagtacgtgaacttcctgtacctggccagccactacgagaagctgaagggcagccccgaggacaacgagcagaagcagctgttcgtggagcagcacaagcactacctggacgagatcatcgagcagatcagcgagttcagcaagcgggtgatcctggccgacgccaacctggacaaggtgctgagcgcctacaacaagcaccgggacaagcccatccgggagcaggccgagaacatcatccacctgttcaccctgaccaacctgggcgcccccgccgccttcaagtacttcgacaccaccatcgaccggaagcggtacaccagcaccaaggaggtgctggacgccaccctgatccaccagagcatcaccggcctgtacgagacccggatcgacctgagccagctgggcggcgacaagcggcccgccgccaccaagaaggccggccaggccaagaagaagaaggccagcgacgccaagagcctgaccgcctggagccggaccctggtgaccttcaaggacgtgttcgtggacttcacccgggaggagtggaagctgctggacaccgcccagcagatcctgtaccggaacgtgatgctggagaactacaagaacctggtgagcctgggctaccagctgaccaagcccgacgtgatcctgcggctggagaagggcgaggagccctggctggtggagcgggagatccaccaggagacccaccccgacagcgagaccgccttcgagatcaagagcagcgtgagcggcggcaagcggcccgccgccaccaagaaggccggccaggccaagaagaagaagggcagctacccctacgacgtgcccgactacgcctgagcggccgcttaattaagctgccttctgcggggcttgccttctggccatgcccttcttctctcccttgcacctgtacctcttggtctttgaataaagcctgagtaggaagtctagaaaaaaaaaaaaaaaaaaaaaaaaaaaaaaaaaaaaaaaaaaaaaaaaaaaaaaaaaaaaaaaaaaaaaaaaaaaaaaaa

SEQ ID NO: 206 - protein, 1528 aa, Artificial Sequence
  Description of Artificial Sequence: Synthetic polypeptide
MAPKKKRKVGIHGVPAADKKYSIGLAIGTNSVGWAVITDEYKVPSKKFKVLGNTDRHSIKKNLIGALLFDSGETAEATRLKRTARRRYTRRKNRICYLQEIFSNEMAKVDDSFFHRLEESFLVEEDKKHERHPIFGNIVDEVAYHEKYPTIYHLRKKLVDSTDKADLRLIYLALAHMIKFRGHFLIEGDLNPDNSDVDKLFIQLVQTYNQLFEENPINASGVDAKAILSARLSKSRRLENLIAQLPGEKKNGLFGNLIALSLGLTPNFKSNFDLAEDAKLQLSKDTYDDDLDNLLAQIGDQYADLFLAAKNLSDAILLSDILRVNTEITKAPLSASMIKRYDEHHQDLTLLKALVRQQLPEKYKEIFFDQSKNGYAGYIDGGASQEEFYKFIKPILEKMDGTEELLVKLNREDLLRKQRTFDNGSIPHQIHLGELHAILRRQEDFYPFLKDNREKIEKILTFRIPYYVGPLARGNSRFAWMTRKSEETITPWNFEEVVDKGASAQSFIERMTNFDKNLPNEKVLPKHSLLYEYFTVYNELTKVKYVTEGMRKPAFLSGEQKKAIVDLLFKTNRKVTVKQLKEDYFKKIECFDSVEISGVEDRFNASLGTYHDLLKIIKDKDFLDNEENEDILEDIVLTLTLFEDREMIEERLKTYAHLFDDKVMKQLKRRRYTGWGRLSRKLINGIRDKQSGKTILDFLKSDGFANRNFMQLIHDDSLTFKEDIQKAQVSGQGDSLHEHIANLAGSPAIKKGILQTVKVVDELVKVMGRHKPENIVIEMARENQTTQKGQKNSRERMKRIEEGIKELGSQILKEHPVENTQLQNEKLYLYYLQNGRDMYVDQELDINRLSDYDVAAIVPQSFLKDDSIDNKVLTRSDKARGKSDNVPSEEVVKKMKNYWRQLLNAKLITQRKFDNLTKAERGGLSELDKAGFIKRQLVETRQITKHVAQILDSRMNTKYDENDKLIREVKVITLKSKLVSDFRKDFQFYKVREINNYHHAHDAYLNAVVGTALIKKYPKLESEFVYGDYKVYDVRKMIAKSEQEIGKATAKYFFYSNIMNFFKTEITLANGEIRKRPLIETNGETGEIVWDKGRDFATVRKVLSMPQVNIVKKTEVQTGGFSKESILPKRNSDKLIARKKDWDPKKYGGFDSPTVAYSVLVVAKVEKGKSKKLKSVKELLGITIMERSSFEKNPIDFLEAKGYKEVKKDLIIKLPKYSLFELENGRKRMLASAGELQKGNELALPSKYVNFLYLASHYEKLKGSPEDNEQKQLFVEQHKHYLDEIIEQISEFSKRVILADANLDKVLSAYNKHRDKPIREQAENIIHLFTLTNLGAPAAFKYFDTTIDRKRYTSTKEVLDATLIHQSITGLYETRIDLSQLGGDKRPAATKKAGQAKKKKASDAKSLTAWSRTLVTFKDVFVDFTREEWKLLDTAQQILYRNVMLENYKNLVSLGYQLTKPDVILRLEKGEEPWLVEREIHQETHPDSETAFEIKSSVSGGKRPAATKKAGQAKKKKGSYPYDVPDYA

SEQ ID NO: 207 - RNA, 5705 nt, Artificial Sequence
  Description of Artificial Sequence: Synthetic polynucleotide
aaggaaauaagagagaaaagaagaguaagaagaaauauaagagccaccauggcccccaagaagaagcggaaggugggcauccacggcgugcccgccgccgacaagaaguacagcaucggccuggccaucggcaccaacagcgugggcugggccgugaucaccgacgaguacaaggugcccagcaagaaguucaaggugcugggcaacaccgaccggcacagcaucaagaagaaccugaucggcgcccugcuguucgacagcggcgagaccgccgaggccacccggcugaagcggaccgcccggcggcgguacacccggcggaagaaccggaucugcuaccugcaggagaucuucagcaacgagauggccaagguggacgacagcuucuuccaccggcuggaggagagcuuccugguggaggaggacaagaagcacgagcggcaccccaucuucggcaacaucguggacgagguggccuaccacgagaaguaccccaccaucuaccaccugcggaagaagcugguggacagcaccgacaaggccgaccugcggcugaucuaccuggcccuggcccacaugaucaaguuccggggccacuuccugaucgagggcgaccugaaccccgacaacagcgacguggacaagcuguucauccagcuggugcagaccuacaaccagcuguucgaggagaaccccaucaacgccagcggcguggacgccaaggccauccugagcgcccggcugagcaagagccggcggcuggagaaccugaucgcccagcugcccggcgagaagaagaacggccuguucggcaaccugaucgcccugagccugggccugacccccaacuucaagagcaacuucgaccuggccgaggacgccaagcugcagcugagcaaggacaccuacgacgacgaccuggacaaccugcuggcccagaucggcgaccaguacgccgaccuguuccuggccgccaagaaccugagcgacgccauccugcugagcgacauccugcgggugaacaccgagaucaccaaggccccccugagcgccagcaugaucaagcgguacgacgagcaccaccaggaccugacccugcugaaggcccuggugcggcagcagcugcccgagaaguacaaggagaucuucuucgaccagagcaagaacggcuacgccggcuacaucgacggcggcgccagccaggaggaguucuacaaguucaucaagcccauccuggagaagauggacggcaccgaggagcugcuggugaagcugaaccgggaggaccugcugcggaagcagcggaccuucgacaacggcagcaucccccaccagauccaccugggcgagcugcacgccauccugcggcggcaggaggacuucuaccccuuccugaaggacaaccgggagaagaucgagaagauccugaccuuccggauccccuacuacgugggcccccuggcccggggcaacagccgguucgccuggaugacccggaaauccgaggagaccaucacccccuggaacuucgaggaggugguggacaagggcgccagcgcccagagcuucaucgagcggaugaccaacuucgacaagaaccugcccaacgagaaggugcugcccaagcacagccugcuguacgaguacuucaccguguacaacgagcugaccaaggugaaguacgugaccgagggcaugcggaagcccgccuuccugagcggcgagcagaagaaggccaucguggaccugcuguucaagaccaaccggaaggugaccgugaagcagcugaaggaggacuacuucaagaagaucgagugcuucgacagcguggagaucagcggcguggaggaccgguucaacgccagccugggcaccuaccacgaccugcugaagaucaucaaggacaaggacuuccuggacaacgaggagaacgaggacauccuggaggacaucgugcugacccugacccuguucgaggaccgggagaugaucgaggagcggcugaaaaccuacgcccaccuguucgacgacaaggugaugaagcagcugaagcggcggcgguacaccggcuggggccggcugagccggaagcugaucaacggcauccgggacaagcagagcggcaagaccauccuggacuuccugaaauccgacggcuucgccaaccggaacuucaugcagcugauccacgacgacagccugaccuucaaggaggacauccagaaggcccaggugagcggccagggcgacagccugcacgagcacaucgccaaccuggccggcagccccgccaucaagaagggcauccugcagaccgugaaggugguggacgagcuggugaaggugaugggccggcacaagcccgagaacaucgugaucgagauggcccgggagaaccagaccacccagaagggccagaagaacagccgggagcggaugaagcggaucgaggagggcaucaaggagcugggcagccagauccugaaggagcaccccguggagaacacccagcugcagaacgagaagcuguaccuguacuaccugcagaacggccgggacauguacguggaccaggagcuggacaucaaccggcugagcgacuacgacguggccgccaucgugccccagagcuuccugaaggacgacagcaucgacaacaaggugcugacccggagcgacaaggcccggggcaagagcgacaacgugcccagcgaggagguggugaagaagaugaagaacuacuggcggcagcugcugaacgccaagcugaucacccagcggaaguucgacaaccugaccaaggccgagcggggcggccugagcgagcuggacaaggccggcuucaucaagcggcagcugguggagacccggcagaucaccaagcacguggcccagauccuggacagccggaugaacaccaaguacgacgagaacgacaagcugauccgggaggugaaggugaucacccugaaauccaagcuggugagcgacuuccggaaggacuuccaguucuacaaggugcgggagaucaacaacuaccaccacgcccacgacgccuaccugaacgccguggugggcaccgcccugaucaagaaguaccccaagcuggagagcgaguucguguacggcgacuacaagguguacgacgugcggaagaugaucgccaagagcgagcaggagaucggcaaggccaccgccaaguacuucuucuacagcaacaucaugaacuucuucaagaccgagaucacccuggccaacggcgagauccggaagcggccccugaucgagaccaacggcgagaccggcgagaucgugugggacaagggccgggacuucgccaccgugcggaaggugcugagcaugccccaggugaacaucgugaagaaaaccgaggugcagaccggcggcuucagcaaggagagcauccugcccaagcggaacagcgacaagcugaucgcccggaagaaggacugggaccccaagaaguacggcggcuucgacagccccaccguggccuacagcgugcuggugguggccaagguggagaagggcaagagcaagaagcugaaauccgugaaggagcugcugggcaucaccaucauggagcggagcagcuucgagaagaaccccaucgacuuccuggaggccaagggcuacaaggaggugaagaaggaccugaucaucaagcugcccaaguacagccuguucgagcuggagaacggccggaagcggaugcuggccagcgccggcgagcugcagaagggcaacgagcuggcccugcccagcaaguacgugaacuuccuguaccuggccagccacuacgagaagcugaagggcagccccgaggacaacgagcagaagcagcuguucguggagcagcacaagcacuaccuggacgagaucaucgagcagaucagcgaguucagcaagcgggugauccuggccgacgccaaccuggacaaggugcugagcgccuacaacaagcaccgggacaagcccauccgggagcaggccgagaacaucauccaccuguucacccugaccaaccugggcgcccccgccgccuucaaguacuucgacaccaccaucgaccggaagcgguacaccagcaccaaggaggugcuggacgccacccugauccaccagagcaucaccggccuguacgagacccggaucgaccugagccagcugggcggcgacaagcggcccgccgccaccaagaaggccggccaggccaagaagaagaaggcccgggacagcaagguggagaacaagaccaagaagcugcggguguucgaggccuucgccggcaucggcgcccagcggaaggcccuggagaaggugcggaaggacgaguacgagaucgugggccuggccgagugguacgugcccgccaucgugauguaccaggccauccacaacaacuuccacaccaagcuggaguacaagagcgugagccgggaggagaugaucgacuaccuggagaacaagacccugagcuggaacagcaagaaccccgugagcaacggcuacuggaagcggaagaaggacgacgagcugaagaucaucuacaacgccaucaagcugagcgagaaggagggcaacaucuucgacauccgggaccuguacaagcggacccugaagaacaucgaccugcugaccuacagcuuccccugccaggaccugagccagcagggcauccagaagggcaugaagcggggcagcggcacccggagcggccugcugugggagaucgagcgggcccuggacagcaccgagaagaacgaccugcccaaguaccugcugauggagaacgugggcgcccugcugcacaagaagaacgaggaggagcugaaccaguggaagcagaagcuggagagccugggcuaccagaacagcaucgaggugcugaacgccgccgacuucggcagcagccaggcccggcggcggguguucaugaucagcacccugaacgaguucguggagcugcccaagggcgacaagaagcccaagagcaucaagaaggugcugaacaagaucgugagcgagaaggacauccugaacaaccugcugaaguacaaccugaccgaguucaagaaaaccaagagcaacaucaacaaggccagccugaucggcuacagcaaguucaacagcgagggcuacguguacgaccccgaguucaccggccccacccugaccgccagcggcgccaacagccggaucaagaucaaggacggcagcaacauccggaagaugaacagcgacgagaccuuccuguacaucggcuucgacagccaggacggcaagcgggugaacgagaucgaguuccugaccgagaaccagaagaucuucgugugcggcaacagcaucagcguggaggugcuggaggccaucaucgacaagaucggcggccccagcagcggcggcaagcggcccgccgccaccaagaaggccggccaggccaagaagaagaagggcagcuaccccuacgacgugcccgacuacgccugagcggccgcuuaauuaagcugccuucugcggggcuugccuucuggccaugcccuucuucucucccuugcaccuguaccucuuggucuuugaauaaagccugaguaggaagucuagaaaaaaaaaaaaaaaaaaaaaaaaaaaaaaaaaaaaaaaaaaaaaaaaaaaaaaaaaaaaaaaaaaaaaaaaaaaaaaaa

SEQ ID NO: 208 - protein, 1820 aa, Artificial Sequence
  Description of Artificial Sequence: Synthetic polypeptide
MAPKKKRKVGIHGVPAADKKYSIGLAIGTNSVGWAVITDEYKVPSKKFKVLGNTDRHSIKKNLIGALLFDSGETAEATRLKRTARRRYTRRKNRICYLQEIFSNEMAKVDDSFFHRLEESFLVEEDKKHERHPIFGNIVDEVAYHEKYPTIYHLRKKLVDSTDKADLRLIYLALAHMIKFRGHFLIEGDLNPDNSDVDKLFIQLVQTYNQLFEENPINASGVDAKAILSARLSKSRRLENLIAQLPGEKKNGLFGNLIALSLGLTPNFKSNFDLAEDAKLQLSKDTYDDDLDNLLAQIGDQYADLFLAAKNLSDAILLSDILRVNTEITKAPLSASMIKRYDEHHQDLTLLKALVRQQLPEKYKEIFFDQSKNGYAGYIDGGASQEEFYKFIKPILEKMDGTEELLVKLNREDLLRKQRTFDNGSIPHQIHLGELHAILRRQEDFYPFLKDNREKIEKILTFRIPYYVGPLARGNSRFAWMTRKSEETITPWNFEEVVDKGASAQSFIERMTNFDKNLPNEKVLPKHSLLYEYFTVYNELTKVKYVTEGMRKPAFLSGEQKKAIVDLLFKTNRKVTVKQLKEDYFKKIECFDSVEISGVEDRFNASLGTYHDLLKIIKDKDFLDNEENEDILEDIVLTLTLFEDREMIEERLKTYAHLFDDKVMKQLKRRRYTGWGRLSRKLINGIRDKQSGKTILDFLKSDGFANRNFMQLIHDDSLTFKEDIQKAQVSGQGDSLHEHIANLAGSPAIKKGILQTVKVVDELVKVMGRHKPENIVIEMARENQTTQKGQKNSRERMKRIEEGIKELGSQILKEHPVENTQLQNEKLYLYYLQNGRDMYVDQELDINRLSDYDVAAIVPQSFLKDDSIDNKVLTRSDKARGKSDNVPSEEVVKKMKNYWRQLLNAKLITQRKFDNLTKAERGGLSELDKAGFIKRQLVETRQITKHVAQILDSRMNTKYDENDKLIREVKVITLKSKLVSDFRKDFQFYKVREINNYHHAHDAYLNAVVGTALIKKYPKLESEFVYGDYKVYDVRKMIAKSEQEIGKATAKYFFYSNIMNFFKTEITLANGEIRKRPLIETNGETGEIVWDKGRDFATVRKVLSMPQVNIVKKTEVQTGGFSKESILPKRNSDKLIARKKDWDPKKYGGFDSPTVAYSVLVVAKVEKGKSKKLKSVKELLGITIMERSSFEKNPIDFLEAKGYKEVKKDLIIKLPKYSLFELENGRKRMLASAGELQKGNELALPSKYVNFLYLASHYEKLKGSPEDNEQKQLFVEQHKHYLDEIIEQISEFSKRVILADANLDKVLSAYNKHRDKPIREQAENIIHLFTLTNLGAPAAFKYFDTTIDRKRYTSTKEVLDATLIHQSITGLYETRIDLSQLGGDKRPAATKKAGQAKKKKARDSKVENKTKKLRVFEAFAGIGAQRKALEKVRKDEYEIVGLAEWYVPAIVMYQAIHNNFHTKLEYKSVSREEMIDYLENKTLSWNSKNPVSNGYWKRKKDDELKIIYNAIKLSEKEGNIFDIRDLYKRTLKNIDLLTYSFPCQDLSQQGIQKGMKRGSGTRSGLLWEIERALDSTEKNDLPKYLLMENVGALLHKKNEEELNQWKQKLESLGYQNSIEVLNAADFGSSQARRRVFMISTLNEFVELPKGDKKPKSIKKVLNKIVSEKDILNNLLKYNLTEFKKTKSNINKASLIGYSKFNSEGYVYDPEFTGPTLTASGANSRIKIKDGSNIRKMNSDETFLYIGFDSQDGKRVNEIEFLTENQKIFVCGNSISVEVLEAIIDKIGGPSSGGKRPAATKKAGQAKKKKGSYPYDVPDYA

SEQ ID NO: 209 - RNA, 6775 nt, Artificial Sequence
  Description of Artificial Sequence: Synthetic polynucleotide
aggaaauaagagagaaaagaagaguaagaagaaauauaagagccaccauggcccccaagaagaagcggaaggugggcggcagcggcggcagcggccagaccggcaagaagagcgagaagggccccgugugcuggcggaagcgggugaagagcgaguacaugcggcugcggcagcugaagcgguuccggcgggccgacgaggugaagagcauguucagcagcaaccggcagaagauccuggagcggaccgagauccugaaccaggaguggaagcagcggcgaauccagcccgugcacauccugaccagcgugagcagccugcggggcacccgggagugcagcgugaccagcgaccuggacuuccccacccaggugaucccccuaaagacccugaacgccguggccagcgugcccaucauguacagcuggagcccccugcagcagaacuucaugguggaggacgagaccgugcugcacaacauccccuacaugggcgacgaggugcuggaccaggacggcaccuucaucgaggagcugaucaagaacuacgacggcaaggugcacggcgaccgggagugcggcuucaucaacgacgagaucuucguggagcuggugaacgcccugggccaguacaacgacgacgacgacgacgacgacggcgacgaccccgaggagcgggaggagaagcagaaggaccuggaggaccaccgggacgacaaggagagccggcccccccggaaguuccccagcgacaagaucuucgaggccaucagcagcauguuccccgacaagggcaccgccgaggagcugaaggagaaguacaaggagcugaccgagcagcagcugcccggcgcccugccccccgagugcacccccaacaucgacggccccaacgccaagagcgugcagcgggagcagagccugcacagcuuccacacccuguucugccggcggugcuucaaguacgacugcuuccugcaccccuuccacgccacccccaacaccuacaagcggaagaacaccgagaccgcccuggacaacaagcccugcggcccccagugcuaccagcaccuggagggcgccaaggaguucgccgccgcccugaccgccgagcggaucaagaccccccccaagcggcccggcggccggcggcggggccggcugcccaacaacagcagccggcccagcacccccaccaucaacgugcuggagagcaaggacaccgacagcgaccgggaggccggcaccgagaccggcggcgagaacaacgacaaggaggaggaggagaagaaggacgagaccagcagcagcagcgaggccaacagccggugccagacccccaucaagaugaagcccaacaucgagccccccgagaacguggaguggagcggcgccgaggccagcauguuccgggugcugaucggcaccuacuacgacaacuucugcgccaucgcccggcugaucggcaccaagaccugccggcagguguacgaguuccgggugaaggagagcagcaucaucgcccccgcccccgccgaggacguggacacccccccccggaagaagaagcggaagcaccggcugugggccgcccacugccggaagauccagcugaagaaggacggcagcagcaaccacguguacaacuaccagcccugcgaccacccccggcagcccugcgacagcagcugccccugcgugaucgcccagaacuucugcgagaaguucugccagugcagcagcgagugccagaaccgguuccccggcugccggugcaaggcccagugcaacaccaagcagugccccugcuaccuggccgugcgggagugcgaccccgaccugugccugaccugcggcgccgccgaccacugggacagcaagaacgugagcugcaagaacugcagcauccagcggggcagcaagaagcaccugcugcuggcccccagcgacguggccggcuggggcaucuucaucaaggaccccgugcagaagaacgaguucaucagcgaguacugcggcgagaucaucagccaggacgaggccgaccggcggggcaagguguacgacaaguacaugugcagcuuccuguucaaccugaacaacgacuucgugguggacgccacccggaagggcaacaagauccgguucgccaaccacagcgugaaccccaacugcuacgccaaggugaugauggugaacggcgaccaccggaucggcaucuucgccaagcgggccauccagaccggcgaggagcuguucuucgacuaccgguacagccaggccgacgcccugaaguacgugggcaucgagcgggagauggagauccccagcaccggcggcagcggcggcagcggcggcagcggcggcagcggcggcagcggccgacccgacaagaaguacagcaucggccuggccaucggcaccaacagcgugggcugggccgugaucaccgacgaguacaaggugcccagcaagaaguucaaggugcugggcaacaccgaccggcacagcaucaagaagaaccugaucggcgcccugcuguucgacagcggcgagaccgccgaggccacccggcugaagcggaccgcccggcggcgguacacccggcggaagaaccggaucugcuaccugcaggagaucuucagcaacgagauggccaagguggacgacagcuucuuccaccggcuggaggagagcuuccugguggaggaggacaagaagcacgagcggcaccccaucuucggcaacaucguggacgagguggccuaccacgagaaguaccccaccaucuaccaccugcggaagaagcugguggacagcaccgacaaggccgaccugcggcugaucuaccuggcccuggcccacaugaucaaguuccggggccacuuccugaucgagggcgaccugaaccccgacaacagcgacguggacaagcuguucauccagcuggugcagaccuacaaccagcuguucgaggagaaccccaucaacgccagcggcguggacgccaaggccauccugagcgcccggcugagcaagagccggcggcuggagaaccugaucgcccagcugcccggcgagaagaagaacggccuguucggcaaccugaucgcccugagccugggccugacccccaacuucaagagcaacuucgaccuggccgaggacgccaagcugcagcugagcaaggacaccuacgacgacgaccuggacaaccugcuggcccagaucggcgaccaguacgccgaccuguuccuggccgccaagaaccugagcgacgccauccugcugagcgacauccugcgggugaacaccgagaucaccaaggccccccugagcgccagcaugaucaagcgguacgacgagcaccaccaggaccugacccugcugaaggcccuggugcggcagcagcugcccgagaaguacaaggagaucuucuucgaccagagcaagaacggcuacgccggcuacaucgacggcggcgccagccaggaggaguucuacaaguucaucaagcccauccuggagaagauggacggcaccgaggagcugcuggugaagcugaaccgggaggaccugcugcggaagcagcggaccuucgacaacggcagcaucccccaccagauccaccugggcgagcugcacgccauccugcggcggcaggaggacuucuaccccuuccugaaggacaaccgggagaagaucgagaagauccugaccuuccggauccccuacuacgugggcccccuggcccggggcaacagccgguucgccuggaugacccggaaauccgaggagaccaucacccccuggaacuucgaggaggugguggacaagggcgccagcgcccagagcuucaucgagcggaugaccaacuucgacaagaaccugcccaacgagaaggugcugcccaagcacagccugcuguacgaguacuucaccguguacaacgagcugaccaaggugaaguacgugaccgagggcaugcggaagcccgccuuccugagcggcgagcagaagaaggccaucguggaccugcuguucaagaccaaccggaaggugaccgugaagcagcugaaggaggacuacuucaagaagaucgagugcuucgacagcguggagaucagcggcguggaggaccgguucaacgccagccugggcaccuaccacgaccugcugaagaucaucaaggacaaggacuuccuggacaacgaggagaacgaggacauccuggaggacaucgugcugacccugacccuguucgaggaccgggagaugaucgaggagcggcugaaaaccuacgcccaccuguucgacgacaaggugaugaagcagcugaagcggcggcgguacaccggcuggggccggcugagccggaagcugaucaacggcauccgggacaagcagagcggcaagaccauccuggacuuccugaaauccgacggcuucgccaaccggaacuucaugcagcugauccacgacgacagccugaccuucaaggaggacauccagaaggcccaggugagcggccagggcgacagccugcacgagcacaucgccaaccuggccggcagccccgccaucaagaagggcauccugcagaccgugaaggugguggacgagcuggugaaggugaugggccggcacaagcccgagaacaucgugaucgagauggcccgggagaaccagaccacccagaagggccagaagaacagccgggagcggaugaagcggaucgaggagggcaucaaggagcugggcagccagauccugaaggagcaccccguggagaacacccagcugcagaacgagaagcuguaccuguacuaccugcagaacggccgggacauguacguggaccaggagcuggacaucaaccggcugagcgacuacgacguggccgccaucgugccccagagcuuccugaaggacgacagcaucgacaacaaggugcugacccggagcgacaaggcccggggcaagagcgacaacgugcccagcgaggagguggugaagaagaugaagaacuacuggcggcagcugcugaacgccaagcugaucacccagcggaaguucgacaaccugaccaaggccgagcggggcggccugagcgagcuggacaaggccggcuucaucaagcggcagcugguggagacccggcagaucaccaagcacguggcccagauccuggacagccggaugaacaccaaguacgacgagaacgacaagcugauccgggaggugaaggugaucacccugaaauccaagcuggugagcgacuuccggaaggacuuccaguucuacaaggugcgggagaucaacaacuaccaccacgcccacgacgccuaccugaacgccguggugggcaccgcccugaucaagaaguaccccaagcuggagagcgaguucguguacggcgacuacaagguguacgacgugcggaagaugaucgccaagagcgagcaggagaucggcaaggccaccgccaaguacuucuucuacagcaacaucaugaacuucuucaagaccgagaucacccuggccaacggcgagauccggaagcggccccugaucgagaccaacggcgagaccggcgagaucgugugggacaagggccgggacuucgccaccgugcggaaggugcugagcaugccccaggugaacaucgugaagaaaaccgaggugcagaccggcggcuucagcaaggagagcauccugcccaagcggaacagcgacaagcugaucgcccggaagaaggacugggaccccaagaaguacggcggcuucgacagccccaccguggccuacagcgugcuggugguggccaagguggagaagggcaagagcaagaagcugaaauccgugaaggagcugcugggcaucaccaucauggagcggagcagcuucgagaagaaccccaucgacuuccuggaggccaagggcuacaaggaggugaagaaggaccugaucaucaagcugcccaaguacagccuguucgagcuggagaacggccggaagcggaugcuggccagcgccggcgagcugcagaagggcaacgagcuggcccugcccagcaaguacgugaacuuccuguaccuggccagccacuacgagaagcugaagggcagccccgaggacaacgagcagaagcagcuguucguggagcagcacaagcacuaccuggacgagaucaucgagcagaucagcgaguucagcaagcgggugauccuggccgacgccaaccuggacaaggugcugagcgccuacaacaagcaccgggacaagcccauccgggagcaggccgagaacaucauccaccuguucacccugaccaaccugggcgcccccgccgccuucaaguacuucgacaccaccaucgaccggaagcgguacaccagcaccaaggaggugcuggacgccacccugauccaccagagcaucaccggccuguacgagacccggaucgaccugagccagcugggcggcgacagcggcggcaagcggcccgccgccaccaagaaggccggccaggccaagaagaagaagggcagcuaccccuacgacgugcccgacuacgccugagcggccgcuuaauuaagcugccuucugcggggcuugccuucuggccaugcccuucuucucucccuugcaccuguaccucuuggucuuugaauaaagccugaguaggaagucuagaaaaaaaaaaaaaaaaaaaaaaaaaaaaaaaaaaaaaaaaaaaaaaaaaaaaaaaaaaaaaaaaaaaaaaaaaaaaaaaa

SEQ ID NO: 210 - protein, 2177 aa, Artificial Sequence
  Description of Artificial Sequence: Synthetic polypeptide
MAPKKKRKVGGSGGSGQTGKKSEKGPVCWRKRVKSEYMRLRQLKRFRRADEVKSMFSSNRQKILERTEILNQEWKQRRIQPVHILTSVSSLRGTRECSVTSDLDFPTQVIPLKTLNAVASVPIMYSWSPLQQNFMVEDETVLHNIPYMGDEVLDQDGTFIEELIKNYDGKVHGDRECGFINDEIFVELVNALGQYNDDDDDDDGDDPEEREEKQKDLEDHRDDKESRPPRKFPSDKIFEAISSMFPDKGTAEELKEKYKELTEQQLPGALPPECTPNIDGPNAKSVQREQSLHSFHTLFCRRCFKYDCFLHPFHATPNTYKRKNTETALDNKPCGPQCYQHLEGAKEFAAALTAERIKTPPKRPGGRRRGRLPNNSSRPSTPTINVLESKDTDSDREAGTETGGENNDKEEEEKKDETSSSSEANSRCQTPIKMKPNIEPPENVEWSGAEASMFRVLIGTYYDNFCAIARLIGTKTCRQVYEFRVKESSIIAPAPAEDVDTPPRKKKRKHRLWAAHCRKIQLKKDGSSNHVYNYQPCDHPRQPCDSSCPCVIAQNFCEKFCQCSSECQNRFPGCRCKAQCNTKQCPCYLAVRECDPDLCLTCGAADHWDSKNVSCKNCSIQRGSKKHLLLAPSDVAGWGIFIKDPVQKNEFISEYCGEIISQDEADRRGKVYDKYMCSFLFNLNNDFVVDATRKGNKIRFANHSVNPNCYAKVMMVNGDHRIGIFAKRAIQTGEELFFDYRYSQADALKYVGIEREMEIPSTGGSGGSGGSGGSGGSGRPDKKYSIGLAIGTNSVGWAVITDEYKVPSKKFKVLGNTDRHSIKKNLIGALLFDSGETAEATRLKRTARRRYTRRKNRICYLQEIFSNEMAKVDDSFFHRLEESFLVEEDKKHERHPIFGNIVDEVAYHEKYPTIYHLRKKLVDSTDKADLRLIYLALAHMIKFRGHFLIEGDLNPDNSDVDKLFIQLVQTYNQLFEENPINASGVDAKAILSARLSKSRRLENLIAQLPGEKKNGLFGNLIALSLGLTPNFKSNFDLAEDAKLQLSKDTYDDDLDNLLAQIGDQYADLFLAAKNLSDAILLSDILRVNTEITKAPLSASMIKRYDEHHQDLTLLKALVRQQLPEKYKEIFFDQSKNGYAGYIDGGASQEEFYKFIKPILEKMDGTEELLVKLNREDLLRKQRTFDNGSIPHQIHLGELHAILRRQEDFYPFLKDNREKIEKILTFRIPYYVGPLARGNSRFAWMTRKSEETITPWNFEEVVDKGASAQSFIERMTNFDKNLPNEKVLPKHSLLYEYFTVYNELTKVKYVTEGMRKPAFLSGEQKKAIVDLLFKTNRKVTVKQLKEDYFKKIECFDSVEISGVEDRFNASLGTYHDLLKIIKDKDFLDNEENEDILEDIVLTLTLFEDREMIEERLKTYAHLFDDKVMKQLKRRRYTGWGRLSRKLINGIRDKQSGKTILDFLKSDGFANRNFMQLIHDDSLTFKEDIQKAQVSGQGDSLHEHIANLAGSPAIKKGILQTVKVVDELVKVMGRHKPENIVIEMARENQTTQKGQKNSRERMKRIEEGIKELGSQILKEHPVENTQLQNEKLYLYYLQNGRDMYVDQELDINRLSDYDVAAIVPQSFLKDDSIDNKVLTRSDKARGKSDNVPSEEVVKKMKNYWRQLLNAKLITQRKFDNLTKAERGGLSELDKAGFIKRQLVETRQITKHVAQILDSRMNTKYDENDKLIREVKVITLKSKLVSDFRKDFQFYKVREINNYHHAHDAYLNAVVGTALIKKYPKLESEFVYGDYKVYDVRKMIAKSEQEIGKATAKYFFYSNIMNFFKTEITLANGEIRKRPLIETNGETGEIVWDKGRDFATVRKVLSMPQVNIVKKTEVQTGGFSKESILPKRNSDKLIARKKDWDPKKYGGFDSPTVAYSVLVVAKVEKGKSKKLKSVKELLGITIMERSSFEKNPIDFLEAKGYKEVKKDLIIKLPKYSLFELENGRKRMLASAGELQKGNELALPSKYVNFLYLASHYEKLKGSPEDNEQKQLFVEQHKHYLDEIIEQISEFSKRVILADANLDKVLSAYNKHRDKPIREQAENIIHLFTLTNLGAPAAFKYFDTTIDRKRYTSTKEVLDATLIHQSITGLYETRIDLSQLGGDSGGKRPAATKKAGQAKKKKGSYPYDVPDYA

SEQ ID NO: 211 - RNA, 6202 nt, Artificial Sequence
  Description of Artificial Sequence: Synthetic polynucleotide
aggaaauaagagagaaaagaagaguaagaagaaauauaagagccaccauggcccccaagaagaagcggaaggugggcauccacggcgugcccgccgccgacaagaaguacagcaucggccuggccaucggcaccaacagcgugggcugggccgugaucaccgacgaguacaaggugcccagcaagaaguucaaggugcugggcaacaccgaccggcacagcaucaagaagaaccugaucggcgcccugcuguucgacagcggcgagaccgccgaggccacccggcugaagcggaccgcccggcggcgguacacccggcggaagaaccggaucugcuaccugcaggagaucuucagcaacgagauggccaagguggacgacagcuucuuccaccggcuggaggagagcuuccugguggaggaggacaagaagcacgagcggcaccccaucuucggcaacaucguggacgagguggccuaccacgagaaguaccccaccaucuaccaccugcggaagaagcugguggacagcaccgacaaggccgaccugcggcugaucuaccuggcccuggcccacaugaucaaguuccggggccacuuccugaucgagggcgaccugaaccccgacaacagcgacguggacaagcuguucauccagcuggugcagaccuacaaccagcuguucgaggagaaccccaucaacgccagcggcguggacgccaaggccauccugagcgcccggcugagcaagagccggcggcuggagaaccugaucgcccagcugcccggcgagaagaagaacggccuguucggcaaccugaucgcccugagccugggccugacccccaacuucaagagcaacuucgaccuggccgaggacgccaagcugcagcugagcaaggacaccuacgacgacgaccuggacaaccugcuggcccagaucggcgaccaguacgccgaccuguuccuggccgccaagaaccugagcgacgccauccugcugagcgacauccugcgggugaacaccgagaucaccaaggccccccugagcgccagcaugaucaagcgguacgacgagcaccaccaggaccugacccugcugaaggcccuggugcggcagcagcugcccgagaaguacaaggagaucuucuucgaccagagcaagaacggcuacgccggcuacaucgacggcggcgccagccaggaggaguucuacaaguucaucaagcccauccuggagaagauggacggcaccgaggagcugcuggugaagcugaaccgggaggaccugcugcggaagcagcggaccuucgacaacggcagcaucccccaccagauccaccugggcgagcugcacgccauccugcggcggcaggaggacuucuaccccuuccugaaggacaaccgggagaagaucgagaagauccugaccuuccggauccccuacuacgugggcccccuggcccggggcaacagccgguucgccuggaugacccggaaauccgaggagaccaucacccccuggaacuucgaggaggugguggacaagggcgccagcgcccagagcuucaucgagcggaugaccaacuucgacaagaaccugcccaacgagaaggugcugcccaagcacagccugcuguacgaguacuucaccguguacaacgagcugaccaaggugaaguacgugaccgagggcaugcggaagcccgccuuccugagcggcgagcagaagaaggccaucguggaccugcuguucaagaccaaccggaaggugaccgugaagcagcugaaggaggacuacuucaagaagaucgagugcuucgacagcguggagaucagcggcguggaggaccgguucaacgccagccugggcaccuaccacgaccugcugaagaucaucaaggacaaggacuuccuggacaacgaggagaacgaggacauccuggaggacaucgugcugacccugacccuguucgaggaccgggagaugaucgaggagcggcugaaaaccuacgcccaccuguucgacgacaaggugaugaagcagcugaagcggcggcgguacaccggcuggggccggcugagccggaagcugaucaacggcauccgggacaagcagagcggcaagaccauccuggacuuccugaaauccgacggcuucgccaaccggaacuucaugcagcugauccacgacgacagccugaccuucaaggaggacauccagaaggcccaggugagcggccagggcgacagccugcacgagcacaucgccaaccuggccggcagccccgccaucaagaagggcauccugcagaccgugaaggugguggacgagcuggugaaggugaugggccggcacaagcccgagaacaucgugaucgagauggcccgggagaaccagaccacccagaagggccagaagaacagccgggagcggaugaagcggaucgaggagggcaucaaggagcugggcagccagauccugaaggagcaccccguggagaacacccagcugcagaacgagaagcuguaccuguacuaccugcagaacggccgggacauguacguggaccaggagcuggacaucaaccggcugagcgacuacgacguggccgccaucgugccccagagcuuccugaaggacgacagcaucgacaacaaggugcugacccggagcgacaaggcccggggcaagagcgacaacgugcccagcgaggagguggugaagaagaugaagaacuacuggcggcagcugcugaacgccaagcugaucacccagcggaaguucgacaaccugaccaaggccgagcggggcggccugagcgagcuggacaaggccggcuucaucaagcggcagcugguggagacccggcagaucaccaagcacguggcccagauccuggacagccggaugaacaccaaguacgacgagaacgacaagcugauccgggaggugaaggugaucacccugaaauccaagcuggugagcgacuuccggaaggacuuccaguucuacaaggugcgggagaucaacaacuaccaccacgcccacgacgccuaccugaacgccguggugggcaccgcccugaucaagaaguaccccaagcuggagagcgaguucguguacggcgacuacaagguguacgacgugcggaagaugaucgccaagagcgagcaggagaucggcaaggccaccgccaaguacuucuucuacagcaacaucaugaacuucuucaagaccgagaucacccuggccaacggcgagauccggaagcggccccugaucgagaccaacggcgagaccggcgagaucgugugggacaagggccgggacuucgccaccgugcggaaggugcugagcaugccccaggugaacaucgugaagaaaaccgaggugcagaccggcggcuucagcaaggagagcauccugcccaagcggaacagcgacaagcugaucgcccggaagaaggacugggaccccaagaaguacggcggcuucgacagccccaccguggccuacagcgugcuggugguggccaagguggagaagggcaagagcaagaagcugaaauccgugaaggagcugcugggcaucaccaucauggagcggagcagcuucgagaagaaccccaucgacuuccuggaggccaagggcuacaaggaggugaagaaggaccugaucaucaagcugcccaaguacagccuguucgagcuggagaacggccggaagcggaugcuggccagcgccggcgagcugcagaagggcaacgagcuggcccugcccagcaaguacgugaacuuccuguaccuggccagccacuacgagaagcugaagggcagccccgaggacaacgagcagaagcagcuguucguggagcagcacaagcacuaccuggacgagaucaucgagcagaucagcgaguucagcaagcgggugauccuggccgacgccaaccuggacaaggugcugagcgccuacaacaagcaccgggacaagcccauccgggagcaggccgagaacaucauccaccuguucacccugaccaaccugggcgcccccgccgccuucaaguacuucgacaccaccaucgaccggaagcgguacaccagcaccaaggaggugcuggacgccacccugauccaccagagcaucaccggccuguacgagacccggaucgaccugagccagcugggcggcgacagcgccggcggcggcggcagcggcggcggcggcagcggcggcggcggcagcggccccaagaagaagcggaagguggccgccgccggcagcaaccacgaccaggaguucgacccccccaagguguacccccccgugcccgccgagaagcggaagcccauccgggugcugagccuguucgacggcaucgccaccggccugcuggugcugaaggaccugggcauccagguggaccgguacaucgccagcgaggugugcgaggacagcaucaccgugggcauggugcggcaccagggcaagaucauguacgugggcgacgugcggagcgugacccagaagcacauccaggaguggggccccuucgaccuggugaucggcggcagccccugcaacgaccugagcaucgugaaccccgcccggaagggccuguacgagggcaccggccggcuguucuucgaguucuaccggcugcugcacgacgcccggcccaaggagggcgacgaccggcccuucuucuggcuguucgagaacgugguggccaugggcgugagcgacaagcgggacaucagccgguuccuggagagcaaccccgugaugaucgacgccaaggaggugagcgccgcccaccgggcccgguacuucuggggcaaccugcccggcaugaaccggccccuggccagcaccgugaacgacaagcuggagcugcaggagugccuggagcacggccggaucgccaaguucagcaaggugcggaccaucaccacccggagcaacagcaucaagcagggcaaggaccagcacuuccccguguucaugaacgagaaggaggacauccuguggugcaccgagauggagcggguguucggcuuccccgugcacuacaccgacgugagcaacaugagccggcuggcccggcagcggcugcugggccggagcuggagcgugcccgugauccggcaccuguucgccccccugaaggaguacuucgccugcgugagcagcggcaacagcaacgccaacagccggggccccagcuucagcagcggccuggugccccugagccugcggggcagccacaugaauccucuggagauguucgagacagugcccguguggagaaggcaacccgugagggugcugagccucuucgaggacauuaagaaggagcugaccucucugggcuuucuggaauccggcagcgaccccggccagcugaaacacgugguggacgugaccgacacagugaggaaggacguggaagaguggggccccuuugaccucguguauggagccacaccuccucucggccacacaugcgauaggccucccagcugguaucucuuccaguuccacagacugcuccaguacgccagaccuaagcccggcagccccagacccuucuucuggauguucguggacaaucuggugcugaacaaggaggaucuggauguggccagcagauuucuggagauggaacccgugacaauccccgacgugcauggcggcucucugcagaacgccgugagagugugguccaacauccccgccauuagaagcagacacugggcucuggugagcgaggaggaacugucucugcuggcccagaauaagcaguccuccaagcuggccgccaaguggcccaccaagcuggugaagaacugcuuucugccucugagggaguauuucaaguauuucagcaccgaacugaccagcagccugagcggcggcaagcggcccgccgccaccaagaaggccggccaggccaagaagaagaagggcagcuaccccuacgacgugcccgacuacgccugagcggccgcuuaauuaagcugccuucugcggggcuugccuucuggccaugcccuucuucucucccuugcaccuguaccucuuggucuuugaauaaagccugaguaggaagucuagaaaaaaaaaaaaaaaaaaaaaaaaaaaaaaaaaaaaaaaaaaaaaaaaaaaaaaaaaaaaaaaaaaaaaaaaaaaaaaaa

SEQ ID NO: 212 - protein, 1986 aa, Artificial Sequence
  Description of Artificial Sequence: Synthetic polypeptide
MAPKKKRKVGIHGVPAADKKYSIGLAIGTNSVGWAVITDEYKVPSKKFKVLGNTDRHSIKKNLIGALLFDSGETAEATRLKRTARRRYTRRKNRICYLQEIFSNEMAKVDDSFFHRLEESFLVEEDKKHERHPIFGNIVDEVAYHEKYPTIYHLRKKLVDSTDKADLRLIYLALAHMIKFRGHFLIEGDLNPDNSDVDKLFIQLVQTYNQLFEENPINASGVDAKAILSARLSKSRRLENLIAQLPGEKKNGLFGNLIALSLGLTPNFKSNFDLAEDAKLQLSKDTYDDDLDNLLAQIGDQYADLFLAAKNLSDAILLSDILRVNTEITKAPLSASMIKRYDEHHQDLTLLKALVRQQLPEKYKEIFFDQSKNGYAGYIDGGASQEEFYKFIKPILEKMDGTEELLVKLNREDLLRKQRTFDNGSIPHQIHLGELHAILRRQEDFYPFLKDNREKIEKILTFRIPYYVGPLARGNSRFAWMTRKSEETITPWNFEEVVDKGASAQSFIERMTNFDKNLPNEKVLPKHSLLYEYFTVYNELTKVKYVTEGMRKPAFLSGEQKKAIVDLLFKTNRKVTVKQLKEDYFKKIECFDSVEISGVEDRFNASLGTYHDLLKIIKDKDFLDNEENEDILEDIVLTLTLFEDREMIEERLKTYAHLFDDKVMKQLKRRRYTGWGRLSRKLINGIRDKQSGKTILDFLKSDGFANRNFMQLIHDDSLTFKEDIQKAQVSGQGDSLHEHIANLAGSPAIKKGILQTVKVVDELVKVMGRHKPENIVIEMARENQTTQKGQKNSRERMKRIEEGIKELGSQILKEHPVENTQLQNEKLYLYYLQNGRDMYVDQELDINRLSDYDVAAIVPQSFLKDDSIDNKVLTRSDKARGKSDNVPSEEVVKKMKNYWRQLLNAKLITQRKFDNLTKAERGGLSELDKAGFIKRQLVETRQITKHVAQILDSRMNTKYDENDKLIREVKVITLKSKLVSDFRKDFQFYKVREINNYHHAHDAYLNAVVGTALIKKYPKLESEFVYGDYKVYDVRKMIAKSEQEIGKATAKYFFYSNIMNFFKTEITLANGEIRKRPLIETNGETGEIVWDKGRDFATVRKVLSMPQVNIVKKTEVQTGGFSKESILPKRNSDKLIARKKDWDPKKYGGFDSPTVAYSVLVVAKVEKGKSKKLKSVKELLGITIMERSSFEKNPIDFLEAKGYKEVKKDLIIKLPKYSLFELENGRKRMLASAGELQKGNELALPSKYVNFLYLASHYEKLKGSPEDNEQKQLFVEQHKHYLDEIIEQISEFSKRVILADANLDKVLSAYNKHRDKPIREQAENIIHLFTLTNLGAPAAFKYFDTTIDRKRYTSTKEVLDATLIHQSITGLYETRIDLSQLGGDSAGGGGSGGGGSGGGGSGPKKKRKVAAAGSNHDQEFDPPKVYPPVPAEKRKPIRVLSLFDGIATGLLVLKDLGIQVDRYIASEVCEDSITVGMVRHQGKIMYVGDVRSVTQKHIQEWGPFDLVIGGSPCNDLSIVNPARKGLYEGTGRLFFEFYRLLHDARPKEGDDRPFFWLFENVVAMGVSDKRDISRFLESNPVMIDAKEVSAAHRARYFWGNLPGMNRPLASTVNDKLELQECLEHGRIAKFSKVRTITTRSNSIKQGKDQHFPVFMNEKEDILWCTEMERVFGFPVHYTDVSNMSRLARQRLLGRSWSVPVIRHLFAPLKEYFACVSSGNSNANSRGPSFSSGLVPLSLRGSHMNPLEMFETVPVWRRQPVRVLSLFEDIKKELTSLGFLESGSDPGQLKHVVDVTDTVRKDVEEWGPFDLVYGATPPLGHTCDRPPSWYLFQFHRLLQYARPKPGSPRPFFWMFVDNLVLNKEDLDVASRFLEMEPVTIPDVHGGSLQNAVRVWSNIPAIRSRHWALVSEEELSLLAQNKQSSKLAAKWPTKLVKNCFLPLREYFKYFSTELTSSLSGGKRPAATKKAGQAKKKKGSYPYDVPDYA

SEQ ID NO: 213 - RNA, 5698 nt, Artificial Sequence
  Description of Artificial Sequence: Synthetic polynucleotide
aggaaauaagagagaaaagaagaguaagaagaaauauaagagccaccauggcccccaagaagaagcggaaggugggcauccacggcgugcccgccgccgacaagaaguacagcaucggccuggccaucggcaccaacagcgugggcugggccgugaucaccgacgaguacaaggugcccagcaagaaguucaaggugcugggcaacaccgaccggcacagcaucaagaagaaccugaucggcgcccugcuguucgacagcggcgagaccgccgaggccacccggcugaagcggaccgcccggcggcgguacacccggcggaagaaccggaucugcuaccugcaggagaucuucagcaacgagauggccaagguggacgacagcuucuuccaccggcuggaggagagcuuccugguggaggaggacaagaagcacgagcggcaccccaucuucggcaacaucguggacgagguggccuaccacgagaaguaccccaccaucuaccaccugcggaagaagcugguggacagcaccgacaaggccgaccugcggcugaucuaccuggcccuggcccacaugaucaaguuccggggccacuuccugaucgagggcgaccugaaccccgacaacagcgacguggacaagcuguucauccagcuggugcagaccuacaaccagcuguucgaggagaaccccaucaacgccagcggcguggacgccaaggccauccugagcgcccggcugagcaagagccggcggcuggagaaccugaucgcccagcugcccggcgagaagaagaacggccuguucggcaaccugaucgcccugagccugggccugacccccaacuucaagagcaacuucgaccuggccgaggacgccaagcugcagcugagcaaggacaccuacgacgacgaccuggacaaccugcuggcccagaucggcgaccaguacgccgaccuguuccuggccgccaagaaccugagcgacgccauccugcugagcgacauccugcgggugaacaccgagaucaccaaggccccccugagcgccagcaugaucaagcgguacgacgagcaccaccaggaccugacccugcugaaggcccuggugcggcagcagcugcccgagaaguacaaggagaucuucuucgaccagagcaagaacggcuacgccggcuacaucgacggcggcgccagccaggaggaguucuacaaguucaucaagcccauccuggagaagauggacggcaccgaggagcugcuggugaagcugaaccgggaggaccugcugcggaagcagcggaccuucgacaacggcagcaucccccaccagauccaccugggcgagcugcacgccauccugcggcggcaggaggacuucuaccccuuccugaaggacaaccgggagaagaucgagaagauccugaccuuccggauccccuacuacgugggcccccuggcccggggcaacagccgguucgccuggaugacccggaaauccgaggagaccaucacccccuggaacuucgaggaggugguggacaagggcgccagcgcccagagcuucaucgagcggaugaccaacuucgacaagaaccugcccaacgagaaggugcugcccaagcacagccugcuguacgaguacuucaccguguacaacgagcugaccaaggugaaguacgugaccgagggcaugcggaagcccgccuuccugagcggcgagcagaagaaggccaucguggaccugcuguucaagaccaaccggaaggugaccgugaagcagcugaaggaggacuacuucaagaagaucgagugcuucgacagcguggagaucagcggcguggaggaccgguucaacgccagccugggcaccuaccacgaccugcugaagaucaucaaggacaaggacuuccuggacaacgaggagaacgaggacauccuggaggacaucgugcugacccugacccuguucgaggaccgggagaugaucgaggagcggcugaaaaccuacgcccaccuguucgacgacaaggugaugaagcagcugaagcggcggcgguacaccggcuggggccggcugagccggaagcugaucaacggcauccgggacaagcagagcggcaagaccauccuggacuuccugaaauccgacggcuucgccaaccggaacuucaugcagcugauccacgacgacagccugaccuucaaggaggacauccagaaggcccaggugagcggccagggcgacagccugcacgagcacaucgccaaccuggccggcagccccgccaucaagaagggcauccugcagaccgugaaggugguggacgagcuggugaaggugaugggccggcacaagcccgagaacaucgugaucgagauggcccgggagaaccagaccacccagaagggccagaagaacagccgggagcggaugaagcggaucgaggagggcaucaaggagcugggcagccagauccugaaggagcaccccguggagaacacccagcugcagaacgagaagcuguaccuguacuaccugcagaacggccgggacauguacguggaccaggagcuggacaucaaccggcugagcgacuacgacguggccgccaucgugccccagagcuuccugaaggacgacagcaucgacaacaaggugcugacccggagcgacaaggcccggggcaagagcgacaacgugcccagcgaggagguggugaagaagaugaagaacuacuggcggcagcugcugaacgccaagcugaucacccagcggaaguucgacaaccugaccaaggccgagcggggcggccugagcgagcuggacaaggccggcuucaucaagcggcagcugguggagacccggcagaucaccaagcacguggcccagauccuggacagccggaugaacaccaaguacgacgagaacgacaagcugauccgggaggugaaggugaucacccugaaauccaagcuggugagcgacuuccggaaggacuuccaguucuacaaggugcgggagaucaacaacuaccaccacgcccacgacgccuaccugaacgccguggugggcaccgcccugaucaagaaguaccccaagcuggagagcgaguucguguacggcgacuacaagguguacgacgugcggaagaugaucgccaagagcgagcaggagaucggcaaggccaccgccaaguacuucuucuacagcaacaucaugaacuucuucaagaccgagaucacccuggccaacggcgagauccggaagcggccccugaucgagaccaacggcgagaccggcgagaucgugugggacaagggccgggacuucgccaccgugcggaaggugcugagcaugccccaggugaacaucgugaagaaaaccgaggugcagaccggcggcuucagcaaggagagcauccugcccaagcggaacagcgacaagcugaucgcccggaagaaggacugggaccccaagaaguacggcggcuucgacagccccaccguggccuacagcgugcuggugguggccaagguggagaagggcaagagcaagaagcugaaauccgugaaggagcugcugggcaucaccaucauggagcggagcagcuucgagaagaaccccaucgacuuccuggaggccaagggcuacaaggaggugaagaaggaccugaucaucaagcugcccaaguacagccuguucgagcuggagaacggccggaagcggaugcuggccagcgccggcgagcugcagaagggcaacgagcuggcccugcccagcaaguacgugaacuuccuguaccuggccagccacuacgagaagcugaagggcagccccgaggacaacgagcagaagcagcuguucguggagcagcacaagcacuaccuggacgagaucaucgagcagaucagcgaguucagcaagcgggugauccuggccgacgccaaccuggacaaggugcugagcgccuacaacaagcaccgggacaagcccauccgggagcaggccgagaacaucauccaccuguucacccugaccaaccugggcgcccccgccgccuucaaguacuucgacaccaccaucgaccggaagcgguacaccagcaccaaggaggugcuggacgccacccugauccaccagagcaucaccggccuguacgagacccggaucgaccugagccagcugggcggcgacagcggcggcaagcggcccgccgccaccaagaaggccggccaggccaagaagaagaagucgggcggggguggcucagaggagcccgaggagcccgccgauagcggacaaucucuggugcccgucuacaucuacagccccgaauaugugagcaugugugauucccucgccaagaucccuaagagagccagcauggugcauucucugaucgaggccuacgcucugcauaagcaaaugaggaucgugaagcccaaggucgccagcauggaagagauggccaccuuucacaccgaugccuaccuccaacaucuccagaaggugucccaagagggcgacgacgaccaccccgacuccauugaguacggacugggcuaugauugccccgccaccgagggcaucuuugacuaugccgccgcuaucggcggagcuaccaucacagccgcccagugucugauugauggcaugugcaaggucgccaucaacugguccggaggcuggcaucaugccaagaaggaugaggccuccggcuucuguuaucugaaugacgccgugcugggcauucugagacugaggaggaaauucgagaggauucuguacguggaucuggaucugcaucacggagauggagucgaagaugccuucagcuucaccagcaaggugaugacagucucucugcacaaguucucccccggcuucuuucccggaaccggcgacguguccgacgugggacugggcaagggaagguacuacagcgugaacgugcccauucaagacggcauccaagacgagaaguacuaccagaucugcgaguccgugcucaaggaggucuaccaagccuucaauccuaaggcugucgugcuccaacugggagcugauaccauugcuggcgaucccaugugcagcuucaauaugacacccgucggaaucggcaagugccucaaguacauccuccaguggcagcucgccacccucauucucggaggaggcggauacaaucuggcuaauaccgccagaugcuggaccuaucugaccggcgugauucugggcaaaacacugagcagcgaaauccccgaccacgaguuuuucaccgcuuacggccccgacuacgugcuggagaucacccccagcugcagacccgauagaaacgaaccccauagaauccagcaaauucugaacuauaucaagggcaaccucaagcacgucgugggagguggcggaucgggaaagcggcccgccgccaccaagaaggccggucaggccaagaagaagaagggcagcuaccccuacgacgugcccgacuacgccugagcggccgcuuaauuaagcugccuucugcggggcuugccuucuggccaugcccuucuucucucccuugcaccuguaccucuuggucuuugaauaaagccugaguaggaagucuagaaaaaaaaaaaaaaaaaaaaaaaaaaaaaaaaaaaaaaaaaaaaaaaaaaaaaaaaaaaaaaaaaaaaaaaaaaaaaaaa

SEQ ID NO: 214 - protein, 1818 aa, Artificial Sequence
  Description of Artificial Sequence: Synthetic polypeptide
MAPKKKRKVGIHGVPAADKKYSIGLAIGTNSVGWAVITDEYKVPSKKFKVLGNTDRHSIKKNLIGALLFDSGETAEATRLKRTARRRYTRRKNRICYLQEIFSNEMAKVDDSFFHRLEESFLVEEDKKHERHPIFGNIVDEVAYHEKYPTIYHLRKKLVDSTDKADLRLIYLALAHMIKFRGHFLIEGDLNPDNSDVDKLFIQLVQTYNQLFEENPINASGVDAKAILSARLSKSRRLENLIAQLPGEKKNGLFGNLIALSLGLTPNFKSNFDLAEDAKLQLSKDTYDDDLDNLLAQIGDQYADLFLAAKNLSDAILLSDILRVNTEITKAPLSASMIKRYDEHHQDLTLLKALVRQQLPEKYKEIFFDQSKNGYAGYIDGGASQEEFYKFIKPILEKMDGTEELLVKLNREDLLRKQRTFDNGSIPHQIHLGELHAILRRQEDFYPFLKDNREKIEKILTFRIPYYVGPLARGNSRFAWMTRKSEETITPWNFEEVVDKGASAQSFIERMTNFDKNLPNEKVLPKHSLLYEYFTVYNELTKVKYVTEGMRKPAFLSGEQKKAIVDLLFKTNRKVTVKQLKEDYFKKIECFDSVEISGVEDRFNASLGTYHDLLKIIKDKDFLDNEENEDILEDIVLTLTLFEDREMIEERLKTYAHLFDDKVMKQLKRRRYTGWGRLSRKLINGIRDKQSGKTILDFLKSDGFANRNFMQLIHDDSLTFKEDIQKAQVSGQGDSLHEHIANLAGSPAIKKGILQTVKVVDELVKVMGRHKPENIVIEMARENQTTQKGQKNSRERMKRIEEGIKELGSQILKEHPVENTQLQNEKLYLYYLQNGRDMYVDQELDINRLSDYDVAAIVPQSFLKDDSIDNKVLTRSDKARGKSDNVPSEEVVKKMKNYWRQLLNAKLITQRKFDNLTKAERGGLSELDKAGFIKRQLVETRQITKHVAQILDSRMNTKYDENDKLIREVKVITLKSKLVSDFRKDFQFYKVREINNYHHAHDAYLNAVVGTALIKKYPKLESEFVYGDYKVYDVRKMIAKSEQEIGKATAKYFFYSNIMNFFKTEITLANGEIRKRPLIETNGETGEIVWDKGRDFATVRKVLSMPQVNIVKKTEVQTGGFSKESILPKRNSDKLIARKKDWDPKKYGGFDSPTVAYSVLVVAKVEKGKSKKLKSVKELLGITIMERSSFEKNPIDFLEAKGYKEVKKDLIIKLPKYSLFELENGRKRMLASAGELQKGNELALPSKYVNFLYLASHYEKLKGSPEDNEQKQLFVEQHKHYLDEIIEQISEFSKRVILADANLDKVLSAYNKHRDKPIREQAENIIHLFTLTNLGAPAAFKYFDTTIDRKRYTSTKEVLDATLIHQSITGLYETRIDLSQLGGDSGGKRPAATKKAGQAKKKKSGGGGSEEPEEPADSGQSLVPVYIYSPEYVSMCDSLAKIPKRASMVHSLIEAYALHKQMRIVKPKVASMEEMATFHTDAYLQHLQKVSQEGDDDHPDSIEYGLGYDCPATEGIFDYAAAIGGATITAAQCLIDGMCKVAINWSGGWHHAKKDEASGFCYLNDAVLGILRLRRKFERILYVDLDLHHGDGVEDAFSFTSKVMTVSLHKFSPGFFPGTGDVSDVGLGKGRYYSVNVPIQDGIQDEKYYQICESVLKEVYQAFNPKAVVLQLGADTIAGDPMCSFNMTPVGIGKCLKYILQWQLATLILGGGGYNLANTARCWTYLTGVILGKTLSSEIPDHEFFTAYGPDYVLEITPSCRPDRNEPHRIQQILNYIKGNLKHVVGGGGSGKRPAATKKAGQAKKKKGSYPYDVPDYA

SEQ ID NO: 215 - RNA, 7987 nt, Artificial Sequence
  Description of Artificial Sequence: Synthetic polynucleotide
aggaaauaagagagaaaagaagaguaagaagaaauauaagagccaccauggcccccaagaagaagcggaaggugggcggcagcggcggcagcggccagaccggcaagaagagcgagaagggccccgugugcuggcggaagcgggugaagagcgaguacaugcggcugcggcagcugaagcgguuccggcgggccgacgaggugaagagcauguucagcagcaaccggcagaagauccuggagcggaccgagauccugaaccaggaguggaagcagcggcgaauccagcccgugcacauccugaccagcgugagcagccugcggggcacccgggagugcagcgugaccagcgaccuggacuuccccacccaggugaucccccuaaagacccugaacgccguggccagcgugcccaucauguacagcuggagcccccugcagcagaacuucaugguggaggacgagaccgugcugcacaacauccccuacaugggcgacgaggugcuggaccaggacggcaccuucaucgaggagcugaucaagaacuacgacggcaaggugcacggcgaccgggagugcggcuucaucaacgacgagaucuucguggagcuggugaacgcccugggccaguacaacgacgacgacgacgacgacgacggcgacgaccccgaggagcgggaggagaagcagaaggaccuggaggaccaccgggacgacaaggagagccggcccccccggaaguuccccagcgacaagaucuucgaggccaucagcagcauguuccccgacaagggcaccgccgaggagcugaaggagaaguacaaggagcugaccgagcagcagcugcccggcgcccugccccccgagugcacccccaacaucgacggccccaacgccaagagcgugcagcgggagcagagccugcacagcuuccacacccuguucugccggcggugcuucaaguacgacugcuuccugcaccccuuccacgccacccccaacaccuacaagcggaagaacaccgagaccgcccuggacaacaagcccugcggcccccagugcuaccagcaccuggagggcgccaaggaguucgccgccgcccugaccgccgagcggaucaagaccccccccaagcggcccggcggccggcggcggggccggcugcccaacaacagcagccggcccagcacccccaccaucaacgugcuggagagcaaggacaccgacagcgaccgggaggccggcaccgagaccggcggcgagaacaacgacaaggaggaggaggagaagaaggacgagaccagcagcagcagcgaggccaacagccggugccagacccccaucaagaugaagcccaacaucgagccccccgagaacguggaguggagcggcgccgaggccagcauguuccgggugcugaucggcaccuacuacgacaacuucugcgccaucgcccggcugaucggcaccaagaccugccggcagguguacgaguuccgggugaaggagagcagcaucaucgcccccgcccccgccgaggacguggacacccccccccggaagaagaagcggaagcaccggcugugggccgcccacugccggaagauccagcugaagaaggacggcagcagcaaccacguguacaacuaccagcccugcgaccacccccggcagcccugcgacagcagcugccccugcgugaucgcccagaacuucugcgagaaguucugccagugcagcagcgagugccagaaccgguuccccggcugccggugcaaggcccagugcaacaccaagcagugccccugcuaccuggccgugcgggagugcgaccccgaccugugccugaccugcggcgccgccgaccacugggacagcaagaacgugagcugcaagaacugcagcauccagcggggcagcaagaagcaccugcugcuggcccccagcgacguggccggcuggggcaucuucaucaaggaccccgugcagaagaacgaguucaucagcgaguacugcggcgagaucaucagccaggacgaggccgaccggcggggcaagguguacgacaaguacaugugcagcuuccuguucaaccugaacaacgacuucgugguggacgccacccggaagggcaacaagauccgguucgccaaccacagcgugaaccccaacugcuacgccaaggugaugauggugaacggcgaccaccggaucggcaucuucgccaagcgggccauccagaccggcgaggagcuguucuucgacuaccgguacagccaggccgacgcccugaaguacgugggcaucgagcgggagauggagauccccagcaccggcggcagcggcggcagcggcggcagcggcggcagcggcggcagcggccgacccgacaagaaguacagcaucggccuggccaucggcaccaacagcgugggcugggccgugaucaccgacgaguacaaggugcccagcaagaaguucaaggugcugggcaacaccgaccggcacagcaucaagaagaaccugaucggcgcccugcuguucgacagcggcgagaccgccgaggccacccggcugaagcggaccgcccggcggcgguacacccggcggaagaaccggaucugcuaccugcaggagaucuucagcaacgagauggccaagguggacgacagcuucuuccaccggcuggaggagagcuuccugguggaggaggacaagaagcacgagcggcaccccaucuucggcaacaucguggacgagguggccuaccacgagaaguaccccaccaucuaccaccugcggaagaagcugguggacagcaccgacaaggccgaccugcggcugaucuaccuggcccuggcccacaugaucaaguuccggggccacuuccugaucgagggcgaccugaaccccgacaacagcgacguggacaagcuguucauccagcuggugcagaccuacaaccagcuguucgaggagaaccccaucaacgccagcggcguggacgccaaggccauccugagcgcccggcugagcaagagccggcggcuggagaaccugaucgcccagcugcccggcgagaagaagaacggccuguucggcaaccugaucgcccugagccugggccugacccccaacuucaagagcaacuucgaccuggccgaggacgccaagcugcagcugagcaaggacaccuacgacgacgaccuggacaaccugcuggcccagaucggcgaccaguacgccgaccuguuccuggccgccaagaaccugagcgacgccauccugcugagcgacauccugcgggugaacaccgagaucaccaaggccccccugagcgccagcaugaucaagcgguacgacgagcaccaccaggaccugacccugcugaaggcccuggugcggcagcagcugcccgagaaguacaaggagaucuucuucgaccagagcaagaacggcuacgccggcuacaucgacggcggcgccagccaggaggaguucuacaaguucaucaagcccauccuggagaagauggacggcaccgaggagcugcuggugaagcugaaccgggaggaccugcugcggaagcagcggaccuucgacaacggcagcaucccccaccagauccaccugggcgagcugcacgccauccugcggcggcaggaggacuucuaccccuuccugaaggacaaccgggagaagaucgagaagauccugaccuuccggauccccuacuacgugggcccccuggcccggggcaacagccgguucgccuggaugacccggaaauccgaggagaccaucacccccuggaacuucgaggaggugguggacaagggcgccagcgcccagagcuucaucgagcggaugaccaacuucgacaagaaccugcccaacgagaaggugcugcccaagcacagccugcuguacgaguacuucaccguguacaacgagcugaccaaggugaaguacgugaccgagggcaugcggaagcccgccuuccugagcggcgagcagaagaaggccaucguggaccugcuguucaagaccaaccggaaggugaccgugaagcagcugaaggaggacuacuucaagaagaucgagugcuucgacagcguggagaucagcggcguggaggaccgguucaacgccagccugggcaccuaccacgaccugcugaagaucaucaaggacaaggacuuccuggacaacgaggagaacgaggacauccuggaggacaucgugcugacccugacccuguucgaggaccgggagaugaucgaggagcggcugaaaaccuacgcccaccuguucgacgacaaggugaugaagcagcugaagcggcggcgguacaccggcuggggccggcugagccggaagcugaucaacggcauccgggacaagcagagcggcaagaccauccuggacuuccugaaauccgacggcuucgccaaccggaacuucaugcagcugauccacgacgacagccugaccuucaaggaggacauccagaaggcccaggugagcggccagggcgacagccugcacgagcacaucgccaaccuggccggcagccccgccaucaagaagggcauccugcagaccgugaaggugguggacgagcuggugaaggugaugggccggcacaagcccgagaacaucgugaucgagauggcccgggagaaccagaccacccagaagggccagaagaacagccgggagcggaugaagcggaucgaggagggcaucaaggagcugggcagccagauccugaaggagcaccccguggagaacacccagcugcagaacgagaagcuguaccuguacuaccugcagaacggccgggacauguacguggaccaggagcuggacaucaaccggcugagcgacuacgacguggccgccaucgugccccagagcuuccugaaggacgacagcaucgacaacaaggugcugacccggagcgacaaggcccggggcaagagcgacaacgugcccagcgaggagguggugaagaagaugaagaacuacuggcggcagcugcugaacgccaagcugaucacccagcggaaguucgacaaccugaccaaggccgagcggggcggccugagcgagcuggacaaggccggcuucaucaagcggcagcugguggagacccggcagaucaccaagcacguggcccagauccuggacagccggaugaacaccaaguacgacgagaacgacaagcugauccgggaggugaaggugaucacccugaaauccaagcuggugagcgacuuccggaaggacuuccaguucuacaaggugcgggagaucaacaacuaccaccacgcccacgacgccuaccugaacgccguggugggcaccgcccugaucaagaaguaccccaagcuggagagcgaguucguguacggcgacuacaagguguacgacgugcggaagaugaucgccaagagcgagcaggagaucggcaaggccaccgccaaguacuucuucuacagcaacaucaugaacuucuucaagaccgagaucacccuggccaacggcgagauccggaagcggccccugaucgagaccaacggcgagaccggcgagaucgugugggacaagggccgggacuucgccaccgugcggaaggugcugagcaugccccaggugaacaucgugaagaaaaccgaggugcagaccggcggcuucagcaaggagagcauccugcccaagcggaacagcgacaagcugaucgcccggaagaaggacugggaccccaagaaguacggcggcuucgacagccccaccguggccuacagcgugcuggugguggccaagguggagaagggcaagagcaagaagcugaaauccgugaaggagcugcugggcaucaccaucauggagcggagcagcuucgagaagaaccccaucgacuuccuggaggccaagggcuacaaggaggugaagaaggaccugaucaucaagcugcccaaguacagccuguucgagcuggagaacggccggaagcggaugcuggccagcgccggcgagcugcagaagggcaacgagcuggcccugcccagcaaguacgugaacuuccuguaccuggccagccacuacgagaagcugaagggcagccccgaggacaacgagcagaagcagcuguucguggagcagcacaagcacuaccuggacgagaucaucgagcagaucagcgaguucagcaagcgggugauccuggccgacgccaaccuggacaaggugcugagcgccuacaacaagcaccgggacaagcccauccgggagcaggccgagaacaucauccaccuguucacccugaccaaccugggcgcccccgccgccuucaaguacuucgacaccaccaucgaccggaagcgguacaccagcaccaaggaggugcuggacgccacccugauccaccagagcaucaccggccuguacgagacccggaucgaccugagccagcugggcggcgacagcggcggcaagcggcccgccgccaccaagaaggccggccaggccaagaagaagaagucgggcggggguggcucagaggagcccgaggagcccgccgauagcggacaaucucuggugcccgucuacaucuacagccccgaauaugugagcaugugugauucccucgccaagaucccuaagagagccagcauggugcauucucugaucgaggccuacgcucugcauaagcaaaugaggaucgugaagcccaaggucgccagcauggaagagauggccaccuuucacaccgaugccuaccuccaacaucuccagaaggugucccaagagggcgacgacgaccaccccgacuccauugaguacggacugggcuaugauugccccgccaccgagggcaucuuugacuaugccgccgcuaucggcggagcuaccaucacagccgcccagugucugauugauggcaugugcaaggucgccaucaacugguccggaggcuggcaucaugccaagaaggaugaggccuccggcuucuguuaucugaaugacgccgugcugggcauucugagacugaggaggaaauucgagaggauucuguacguggaucuggaucugcaucacggagauggagucgaagaugccuucagcuucaccagcaaggugaugacagucucucugcacaaguucucccccggcuucuuucccggaaccggcgacguguccgacgugggacugggcaagggaagguacuacagcgugaacgugcccauucaagacggcauccaagacgagaaguacuaccagaucugcgaguccgugcucaaggaggucuaccaagccuucaauccuaaggcugucgugcuccaacugggagcugauaccauugcuggcgaucccaugugcagcuucaauaugacacccgucggaaucggcaagugccucaaguacauccuccaguggcagcucgccacccucauucucggaggaggcggauacaaucuggcuaauaccgccagaugcuggaccuaucugaccggcgugauucugggcaaaacacugagcagcgaaauccccgaccacgaguuuuucaccgcuuacggccccgacuacgugcuggagaucacccccagcugcagacccgauagaaacgaaccccauagaauccagcaaauucugaacuauaucaagggcaaccucaagcacgucgugggagguggcggaucgggaaagcggcccgccgccaccaagaaggccggucaggccaagaagaagaagggcagcuaccccuacgacgugcccgacuacgccugagcggccgcuuaauuaagcugccuucugcggggcuugccuucuggccaugcccuucuucucucccuugcaccuguaccucuuggucuuugaauaaagccugaguaggaagucuagaaaaaaaaaaaaaaaaaaaaaaaaaaaaaaaaaaaaaaaaaaaaaaaaaaaaaaaaaaaaaaaaaaaaaaaaaaaaaaaa

SEQ ID NO: 216 - protein, 2581 aa, Artificial Sequence
  Description of Artificial Sequence: Synthetic polypeptide
MAPKKKRKVGGSGGSGQTGKKSEKGPVCWRKRVKSEYMRLRQLKRFRRADEVKSMFSSNRQKILERTEILNQEWKQRRIQPVHILTSVSSLRGTRECSVTSDLDFPTQVIPLKTLNAVASVPIMYSWSPLQQNFMVEDETVLHNIPYMGDEVLDQDGTFIEELIKNYDGKVHGDRECGFINDEIFVELVNALGQYNDDDDDDDGDDPEEREEKQKDLEDHRDDKESRPPRKFPSDKIFEAISSMFPDKGTAEELKEKYKELTEQQLPGALPPECTPNIDGPNAKSVQREQSLHSFHTLFCRRCFKYDCFLHPFHATPNTYKRKNTETALDNKPCGPQCYQHLEGAKEFAAALTAERIKTPPKRPGGRRRGRLPNNSSRPSTPTINVLESKDTDSDREAGTETGGENNDKEEEEKKDETSSSSEANSRCQTPIKMKPNIEPPENVEWSGAEASMFRVLIGTYYDNFCAIARLIGTKTCRQVYEFRVKESSIIAPAPAEDVDTPPRKKKRKHRLWAAHCRKIQLKKDGSSNHVYNYQPCDHPRQPCDSSCPCVIAQNFCEKFCQCSSECQNRFPGCRCKAQCNTKQCPCYLAVRECDPDLCLTCGAADHWDSKNVSCKNCSIQRGSKKHLLLAPSDVAGWGIFIKDPVQKNEFISEYCGEIISQDEADRRGKVYDKYMCSFLFNLNNDFVVDATRKGNKIRFANHSVNPNCYAKVMMVNGDHRIGIFAKRAIQTGEELFFDYRYSQADALKYVGIEREMEIPSTGGSGGSGGSGGSGGSGRPDKKYSIGLAIGTNSVGWAVITDEYKVPSKKFKVLGNTDRHSIKKNLIGALLFDSGETAEATRLKRTARRRYTRRKNRICYLQEIFSNEMAKVDDSFFHRLEESFLVEEDKKHERHPIFGNIVDEVAYHEKYPTIYHLRKKLVDSTDKADLRLIYLALAHMIKFRGHFLIEGDLNPDNSDVDKLFIQLVQTYNQLFEENPINASGVDAKAILSARLSKSRRLENLIAQLPGEKKNGLFGNLIALSLGLTPNFKSNFDLAEDAKLQLSKDTYDDDLDNLLAQIGDQYADLFLAAKNLSDAILLSDILRVNTEITKAPLSASMIKRYDEHHQDLTLLKALVRQQLPEKYKEIFFDQSKNGYAGYIDGGASQEEFYKFIKPILEKMDGTEELLVKLNREDLLRKQRTFDNGSIPHQIHLGELHAILRRQEDFYPFLKDNREKIEKILTFRIPYYVGPLARGNSRFAWMTRKSEETITPWNFEEVVDKGASAQSFIERMTNFDKNLPNEKVLPKHSLLYEYFTVYNELTKVKYVTEGMRKPAFLSGEQKKAIVDLLFKTNRKVTVKQLKEDYFKKIECFDSVEISGVEDRFNASLGTYHDLLKIIKDKDFLDNEENEDILEDIVLTLTLFEDREMIEERLKTYAHLFDDKVMKQLKRRRYTGWGRLSRKLINGIRDKQSGKTILDFLKSDGFANRNFMQLIHDDSLTFKEDIQKAQVSGQGDSLHEHIANLAGSPAIKKGILQTVKVVDELVKVMGRHKPENIVIEMARENQTTQKGQKNSRERMKRIEEGIKELGSQILKEHPVENTQLQNEKLYLYYLQNGRDMYVDQELDINRLSDYDVAAIVPQSFLKDDSIDNKVLTRSDKARGKSDNVPSEEVVKKMKNYWRQLLNAKLITQRKFDNLTKAERGGLSELDKAGFIKRQLVETRQITKHVAQILDSRMNTKYDENDKLIREVKVITLKSKLVSDFRKDFQFYKVREINNYHHAHDAYLNAVVGTALIKKYPKLESEFVYGDYKVYDVRKMIAKSEQEIGKATAKYFFYSNIMNFFKTEITLANGEIRKRPLIETNGETGEIVWDKGRDFATVRKVLSMPQVNIVKKTEVQTGGFSKESILPKRNSDKLIARKKDWDPKKYGGFDSPTVAYSVLVVAKVEKGKSKKLKSVKELLGITIMERSSFEKNPIDFLEAKGYKEVKKDLIIKLPKYSLFELENGRKRMLASAGELQKGNELALPSKYVNFLYLASHYEKLKGSPEDNEQKQLFVEQHKHYLDEIIEQISEFSKRVILADANLDKVLSAYNKHRDKPIREQAENIIHLFTLTNLGAPAAFKYFDTTIDRKRYTSTKEVLDATLIHQSITGLYETRIDLSQLGGDSGGKRPAATKKAGQAKKKKSGGGGSEEPEEPADSGQSLVPVYIYSPEYVSMCDSLAKIPKRASMVHSLIEAYALHKQMRIVKPKVASMEEMATFHTDAYLQHLQKVSQEGDDDHPDSIEYGLGYDCPATEGIFDYAAAIGGATITAAQCLIDGMCKVAINWSGGWHHAKKDEASGFCYLNDAVLGILRLRRKFERILYVDLDLHHGDGVEDAFSFTSKVMTVSLHKFSPGFFPGTGDVSDVGLGKGRYYSVNVPIQDGIQDEKYYQICESVLKEVYQAFNPKAVVLQLGADTIAGDPMCSFNMTPVGIGKCLKYILQWQLATLILGGGGYNLANTARCWTYLTGVILGKTLSSEIPDHEFFTAYGPDYVLEITPSCRPDRNEPHRIQQILNYIKGNLKHVVGGGGSGKRPAATKKAGQAKKKKGSYPYDVPDYA

SEQ ID NO: 217 - RNA, 4486 nt, Artificial Sequence
  Description of Artificial Sequence: Synthetic polynucleotide
aggaaauaagagagaaaagaagaguaagaagaaauauaagagccaccauggcccccaagaagaagcggaaggugggcauccacggcgugcccgccgccgacaagaaguacagcaucggccuggacaucggcaccaacagcgugggcugggccgugaucaccgacgaguacaaggugcccagcaagaaguucaaggugcugggcaacaccgaccggcacagcaucaagaagaaccugaucggcgcccugcuguucgacagcggcgagaccgccgaggccacccggcugaagcggaccgcccggcggcgguacacccggcggaagaaccggaucugcuaccugcaggagaucuucagcaacgagauggccaagguggacgacagcuucuuccaccggcuggaggagagcuuccugguggaggaggacaagaagcacgagcggcaccccaucuucggcaacaucguggacgagguggccuaccacgagaaguaccccaccaucuaccaccugcggaagaagcugguggacagcaccgacaaggccgaccugcggcugaucuaccuggcccuggcccacaugaucaaguuccggggccacuuccugaucgagggcgaccugaaccccgacaacagcgacguggacaagcuguucauccagcuggugcagaccuacaaccagcuguucgaggagaaccccaucaacgccagcggcguggacgccaaggccauccugagcgcccggcugagcaagagccggcggcuggagaaccugaucgcccagcugcccggcgagaagaagaacggccuguucggcaaccugaucgcccugagccugggccugacccccaacuucaagagcaacuucgaccuggccgaggacgccaagcugcagcugagcaaggacaccuacgacgacgaccuggacaaccugcuggcccagaucggcgaccaguacgccgaccuguuccuggccgccaagaaccugagcgacgccauccugcugagcgacauccugcgggugaacaccgagaucaccaaggccccccugagcgccagcaugaucaagcgguacgacgagcaccaccaggaccugacccugcugaaggcccuggugcggcagcagcugcccgagaaguacaaggagaucuucuucgaccagagcaagaacggcuacgccggcuacaucgacggcggcgccagccaggaggaguucuacaaguucaucaagcccauccuggagaagauggacggcaccgaggagcugcuggugaagcugaaccgggaggaccugcugcggaagcagcggaccuucgacaacggcagcaucccccaccagauccaccugggcgagcugcacgccauccugcggcggcaggaggacuucuaccccuuccugaaggacaaccgggagaagaucgagaagauccugaccuuccggauccccuacuacgugggcccccuggcccggggcaacagccgguucgccuggaugacccggaaauccgaggagaccaucacccccuggaacuucgaggaggugguggacaagggcgccagcgcccagagcuucaucgagcggaugaccaacuucgacaagaaccugcccaacgagaaggugcugcccaagcacagccugcuguacgaguacuucaccguguacaacgagcugaccaaggugaaguacgugaccgagggcaugcggaagcccgccuuccugagcggcgagcagaagaaggccaucguggaccugcuguucaagaccaaccggaaggugaccgugaagcagcugaaggaggacuacuucaagaagaucgagugcuucgacagcguggagaucagcggcguggaggaccgguucaacgccagccugggcaccuaccacgaccugcugaagaucaucaaggacaaggacuuccuggacaacgaggagaacgaggacauccuggaggacaucgugcugacccugacccuguucgaggaccgggagaugaucgaggagcggcugaaaaccuacgcccaccuguucgacgacaaggugaugaagcagcugaagcggcggcgguacaccggcuggggccggcugagccggaagcugaucaacggcauccgggacaagcagagcggcaagaccauccuggacuuccugaaauccgacggcuucgccaaccggaacuucaugcagcugauccacgacgacagccugaccuucaaggaggacauccagaaggcccaggugagcggccagggcgacagccugcacgagcacaucgccaaccuggccggcagccccgccaucaagaagggcauccugcagaccgugaaggugguggacgagcuggugaaggugaugggccggcacaagcccgagaacaucgugaucgagauggcccgggagaaccagaccacccagaagggccagaagaacagccgggagcggaugaagcggaucgaggagggcaucaaggagcugggcagccagauccugaaggagcaccccguggagaacacccagcugcagaacgagaagcuguaccuguacuaccugcagaacggccgggacauguacguggaccaggagcuggacaucaaccggcugagcgacuacgacguggaccacaucgugccccagagcuuccugaaggacgacagcaucgacaacaaggugcugacccggagcgacaagaaccggggcaagagcgacaacgugcccagcgaggagguggugaagaagaugaagaacuacuggcggcagcugcugaacgccaagcugaucacccagcggaaguucgacaaccugaccaaggccgagcggggcggccugagcgagcuggacaaggccggcuucaucaagcggcagcugguggagacccggcagaucaccaagcacguggcccagauccuggacagccggaugaacaccaaguacgacgagaacgacaagcugauccgggaggugaaggugaucacccugaaauccaagcuggugagcgacuuccggaaggacuuccaguucuacaaggugcgggagaucaacaacuaccaccacgcccacgacgccuaccugaacgccguggugggcaccgcccugaucaagaaguaccccaagcuggagagcgaguucguguacggcgacuacaagguguacgacgugcggaagaugaucgccaagagcgagcaggagaucggcaaggccaccgccaaguacuucuucuacagcaacaucaugaacuucuucaagaccgagaucacccuggccaacggcgagauccggaagcggccccugaucgagaccaacggcgagaccggcgagaucgugugggacaagggccgggacuucgccaccgugcggaaggugcugagcaugccccaggugaacaucgugaagaaaaccgaggugcagaccggcggcuucagcaaggagagcauccugcccaagcggaacagcgacaagcugaucgcccggaagaaggacugggaccccaagaaguacggcggcuucgacagccccaccguggccuacagcgugcuggugguggccaagguggagaagggcaagagcaagaagcugaaauccgugaaggagcugcugggcaucaccaucauggagcggagcagcuucgagaagaaccccaucgacuuccuggaggccaagggcuacaaggaggugaagaaggaccugaucaucaagcugcccaaguacagccuguucgagcuggagaacggccggaagcggaugcuggccagcgccggcgagcugcagaagggcaacgagcuggcccugcccagcaaguacgugaacuuccuguaccuggccagccacuacgagaagcugaagggcagccccgaggacaacgagcagaagcagcuguucguggagcagcacaagcacuaccuggacgagaucaucgagcagaucagcgaguucagcaagcgggugauccuggccgacgccaaccuggacaaggugcugagcgccuacaacaagcaccgggacaagcccauccgggagcaggccgagaacaucauccaccuguucacccugaccaaccugggcgcccccgccgccuucaaguacuucgacaccaccaucgaccggaagcgguacaccagcaccaaggaggugcuggacgccacccugauccaccagagcaucaccggccuguacgagacccggaucgaccugagccagcugggcggcgacagcggcggcaagcggcccgccgccaccaagaaggccggccaggccaagaagaagaagggcagcuaccccuacgacgugcccgacuacgccugagcggccgcuuaauuaagcugccuucugcggggcuugccuucuggccaugcccuucuucucucccuugcaccuguaccucuuggucuuugaauaaagccugaguaggaagucuagaaaaaaaaaaaaaaaaaaaaaaaaaaaaaaaaaaaaaaaaaaaaaaaaaaaaaaaaaaaaaaaaaaaaaaaaaaaaaaaa

SEQ ID NO: 218 - protein, 1414 aa, Artificial Sequence
  Description of Artificial Sequence: Synthetic polypeptide
MAPKKKRKVGIHGVPAADKKYSIGLDIGTNSVGWAVITDEYKVPSKKFKVLGNTDRHSIKKNLIGALLFDSGETAEATRLKRTARRRYTRRKNRICYLQEIFSNEMAKVDDSFFHRLEESFLVEEDKKHERHPIFGNIVDEVAYHEKYPTIYHLRKKLVDSTDKADLRLIYLALAHMIKFRGHFLIEGDLNPDNSDVDKLFIQLVQTYNQLFEENPINASGVDAKAILSARLSKSRRLENLIAQLPGEKKNGLFGNLIALSLGLTPNFKSNFDLAEDAKLQLSKDTYDDDLDNLLAQIGDQYADLFLAAKNLSDAILLSDILRVNTEITKAPLSASMIKRYDEHHQDLTLLKALVRQQLPEKYKEIFFDQSKNGYAGYIDGGASQEEFYKFIKPILEKMDGTEELLVKLNREDLLRKQRTFDNGSIPHQIHLGELHAILRRQEDFYPFLKDNREKIEKILTFRIPYYVGPLARGNSRFAWMTRKSEETITPWNFEEVVDKGASAQSFIERMTNFDKNLPNEKVLPKHSLLYEYFTVYNELTKVKYVTEGMRKPAFLSGEQKKAIVDLLFKTNRKVTVKQLKEDYFKKIECFDSVEISGVEDRFNASLGTYHDLLKIIKDKDFLDNEENEDILEDIVLTLTLFEDREMIEERLKTYAHLFDDKVMKQLKRRRYTGWGRLSRKLINGIRDKQSGKTILDFLKSDGFANRNFMQLIHDDSLTFKEDIQKAQVSGQGDSLHEHIANLAGSPAIKKGILQTVKVVDELVKVMGRHKPENIVIEMARENQTTQKGQKNSRERMKRIEEGIKELGSQILKEHPVENTQLQNEKLYLYYLQNGRDMYVDQELDINRLSDYDVDHIVPQSFLKDDSIDNKVLTRSDKNRGKSDNVPSEEVVKKMKNYWRQLLNAKLITQRKFDNLTKAERGGLSELDKAGFIKRQLVETRQITKHVAQILDSRMNTKYDENDKLIREVKVITLKSKLVSDFRKDFQFYKVREINNYHHAHDAYLNAVVGTALIKKYPKLESEFVYGDYKVYDVRKMIAKSEQEIGKATAKYFFYSNIMNFFKTEITLANGEIRKRPLIETNGETGEIVWDKGRDFATVRKVLSMPQVNIVKKTEVQTGGFSKESILPKRNSDKLIARKKDWDPKKYGGFDSPTVAYSVLVVAKVEKGKSKKLKSVKELLGITIMERSSFEKNPIDFLEAKGYKEVKKDLIIKLPKYSLFELENGRKRMLASAGELQKGNELALPSKYVNFLYLASHYEKLKGSPEDNEQKQLFVEQHKHYLDEIIEQISEFSKRVILADANLDKVLSAYNKHRDKPIREQAENIIHLFTLTNLGAPAAFKYFDTTIDRKRYTSTKEVLDATLIHQSITGLYETRIDLSQLGGDSGGKRPAATKKAGQAKKKKGSYPYDVPDYA

SEQ ID NO: 219 - DNA, 3262 bp, Artificial Sequence
  Description of Artificial Sequence: Synthetic polynucleotide
aggaaataagagagaaaagaagagtaagaagaaatataagagccaccatggcccccaagaagaagcggaaggtgggcggcagcggcggcagcggccagaccggcaagaagagcgagaagggccccgtgtgctggcggaagcgggtgaagagcgagtacatgcggctgcggcagctgaagcggttccggcgggccgacgaggtgaagagcatgttcagcagcaaccggcagaagatcctggagcggaccgagatcctgaaccaggagtggaagcagcggcgaatccagcccgtgcacatcctgaccagcgtgagcagcctgcggggcacccgggagtgcagcgtgaccagcgacctggacttccccacccaggtgatccccctaaagaccctgaacgccgtggccagcgtgcccatcatgtacagctggagccccctgcagcagaacttcatggtggaggacgagaccgtgctgcacaacatcccctacatgggcgacgaggtgctggaccaggacggcaccttcatcgaggagctgatcaagaactacgacggcaaggtgcacggcgaccgggagtgcggcttcatcaacgacgagatcttcgtggagctggtgaacgccctgggccagtacaacgacgacgacgacgacgacgacggcgacgaccccgaggagcgggaggagaagcagaaggacctggaggaccaccgggacgacaaggagagccggcccccccggaagttccccagcgacaagatcttcgaggccatcagcagcatgttccccgacaagggcaccgccgaggagctgaaggagaagtacaaggagctgaccgagcagcagctgcccggcgccctgccccccgagtgcacccccaacatcgacggccccaacgccaagagcgtgcagcgggagcagagcctgcacagcttccacaccctgttctgccggcggtgcttcaagtacgactgcttcctgcaccccttccacgccacccccaacacctacaagcggaagaacaccgagaccgccctggacaacaagccctgcggcccccagtgctaccagcacctggagggcgccaaggagttcgccgccgccctgaccgccgagcggatcaagaccccccccaagcggcccggcggccggcggcggggccggctgcccaacaacagcagccggcccagcacccccaccatcaacgtgctggagagcaaggacaccgacagcgaccgggaggccggcaccgagaccggcggcgagaacaacgacaaggaggaggaggagaagaaggacgagaccagcagcagcagcgaggccaacagccggtgccagacccccatcaagatgaagcccaacatcgagccccccgagaacgtggagtggagcggcgccgaggccagcatgttccgggtgctgatcggcacctactacgacaacttctgcgccatcgcccggctgatcggcaccaagacctgccggcaggtgtacgagttccgggtgaaggagagcagcatcatcgcccccgcccccgccgaggacgtggacacccccccccggaagaagaagcggaagcaccggctgtgggccgcccactgccggaagatccagctgaagaaggacggcagcagcaaccacgtgtacaactaccagccctgcgaccacccccggcagccctgcgacagcagctgcccctgcgtgatcgcccagaacttctgcgagaagttctgccagtgcagcagcgagtgccagaaccggttccccggctgccggtgcaaggcccagtgcaacaccaagcagtgcccctgctacctggccgtgcgggagtgcgaccccgacctgtgcctgacctgcggcgccgccgaccactgggacagcaagaacgtgagctgcaagaactgcagcatccagcggggcagcaagaagcacctgctgctggcccccagcgacgtggccggctggggcatcttcatcaaggaccccgtgcagaagaacgagttcatcagcgagtactgcggcgagatcatcagccaggacgaggccgaccggcggggcaaggtgtacgacaagtacatgtgcagcttcctgttcaacctgaacaacgacttcgtggtggacgccacccggaagggcaacaagatccggttcgccaaccacagcgtgaaccccaactgctacgccaaggtgatgatggtgaacggcgaccaccggatcggcatcttcgccaagcgggccatccagaccggcgaggagctgttcttcgactaccggtacagccaggccgacgccctgaagtacgtgggcatcgagcgggagatggagatccccggcagcagcggatccctggagcccggcgaaaagccttacaagtgtcccgagtgcggaaagagcttcagcagagccgataatctgaccgagcaccaaaggacccacaccggagagaagccttataagtgtcccgaatgcggcaaaagcttttctagaagcgatcatctgaccaaccaccagaggacacacaccggagaaaaaccttacaaatgccccgagtgcggcaaaagcttctcccagagcagcaatctggtgagacaccaaaggacccacaccggcgaaaaaccctataaatgccccgaatgtggcaagagctttagcacatccggcgagctggtgaggcatcaaagaacacataccggcgagaagccctacaagtgccccgagtgtggaaaaagcttcagcacccacctcgatctgatcagacaccagaggacccataccggagagaaaccctacaaatgtcccgagtgcggaaagtcctttagccagctggcccatctgagagctcatcaaaggacacacaccggcgagaagccttacaagtgtcccgagtgcggaaaatccttctcccaactggcccatctgagggcccaccagagaacccacaccggcaaaaagacctccgctagcggcagcggcggcggcagcggcggcaagcggcccgccgccaccaagaaggccggccaggccaagaagaagaagggcagctacccctacgacgtgcccgactacgcctgagcggccgcttaattaagctgccttctgcggggcttgccttctggccatgcccttcttctctcccttgcacctgtacctcttggtctttgaataaagcctgagtaggaagtctagaaaaaaaaaaaaaaaaaaaaaaaaaaaaaaaaaaaaaaaaaaaaaaaaaaaaaaaaaaaaaaaaaaaaaaaaaaaaaaaa

SEQ ID NO: 220 - DNA, 3262 bp, Artificial Sequence
  Description of Artificial Sequence: Synthetic polynucleotide
aggaaataagagagaaaagaagagtaagaagaaatataagagccaccatggcccccaagaagaagcggaaggtgggcggcagcggcggcagcggccagaccggcaagaagagcgagaagggccccgtgtgctggcggaagcgggtgaagagcgagtacatgcggctgcggcagctgaagcggttccggcgggccgacgaggtgaagagcatgttcagcagcaaccggcagaagatcctggagcggaccgagatcctgaaccaggagtggaagcagcggcgaatccagcccgtgcacatcctgaccagcgtgagcagcctgcggggcacccgggagtgcagcgtgaccagcgacctggacttccccacccaggtgatccccctaaagaccctgaacgccgtggccagcgtgcccatcatgtacagctggagccccctgcagcagaacttcatggtggaggacgagaccgtgctgcacaacatcccctacatgggcgacgaggtgctggaccaggacggcaccttcatcgaggagctgatcaagaactacgacggcaaggtgcacggcgaccgggagtgcggcttcatcaacgacgagatcttcgtggagctggtgaacgccctgggccagtacaacgacgacgacgacgacgacgacggcgacgaccccgaggagcgggaggagaagcagaaggacctggaggaccaccgggacgacaaggagagccggcccccccggaagttccccagcgacaagatcttcgaggccatcagcagcatgttccccgacaagggcaccgccgaggagctgaaggagaagtacaaggagctgaccgagcagcagctgcccggcgccctgccccccgagtgcacccccaacatcgacggccccaacgccaagagcgtgcagcgggagcagagcctgcacagcttccacaccctgttctgccggcggtgcttcaagtacgactgcttcctgcaccccttccacgccacccccaacacctacaagcggaagaacaccgagaccgccctggacaacaagccctgcggcccccagtgctaccagcacctggagggcgccaaggagttcgccgccgccctgaccgccgagcggatcaagaccccccccaagcggcccggcggccggcggcggggccggctgcccaacaacagcagccggcccagcacccccaccatcaacgtgctggagagcaaggacaccgacagcgaccgggaggccggcaccgagaccggcggcgagaacaacgacaaggaggaggaggagaagaaggacgagaccagcagcagcagcgaggccaacagccggtgccagacccccatcaagatgaagcccaacatcgagccccccgagaacgtggagtggagcggcgccgaggccagcatgttccgggtgctgatcggcacctactacgacaacttctgcgccatcgcccggctgatcggcaccaagacctgccggcaggtgtacgagttccgggtgaaggagagcagcatcatcgcccccgcccccgccgaggacgtggacacccccccccggaagaagaagcggaagcaccggctgtgggccgcccactgccggaagatccagctgaagaaggacggcagcagcaaccacgtgtacaactaccagccctgcgaccacccccggcagccctgcgacagcagctgcccctgcgtgatcgcccagaacttctgcgagaagttctgccagtgcagcagcgagtgccagaaccggttccccggctgccggtgcaaggcccagtgcaacaccaagcagtgcccctgctacctggccgtgcgggagtgcgaccccgacctgtgcctgacctgcggcgccgccgaccactgggacagcaagaacgtgagctgcaagaactgcagcatccagcggggcagcaagaagcacctgctgctggcccccagcgacgtggccggctggggcatcttcatcaaggaccccgtgcagaagaacgagttcatcagcgagtactgcggcgagatcatcagccaggacgaggccgaccggcggggcaaggtgtacgacaagtacatgtgcagcttcctgttcaacctgaacaacgacttcgtggtggacgccacccggaagggcaacaagatccggttcgccaaccacagcgtgaaccccaactgctacgccaaggtgatgatggtgaacggcgaccaccggatcggcatcttcgccaagcgggccatccagaccggcgaggagctgttcttcgactaccggtacagccaggccgacgccctgaagtacgtgggcatcgagcgggagatggagatccccggcagcagcggatccctggagcccggcgaaaagccttacaaatgtcccgaatgcggaaagagcttcagcagagccgacaatctgaccgaacatcagagaacccataccggagaaaaaccttacaaatgtcccgagtgcggcaaaagcttctcccaagccggacatctggccagccaccaaaggacacataccggcgagaaaccctacaagtgccccgagtgcggcaagtccttctctagatccgatgagctggtcagacatcagagaacccataccggcgagaagccttataagtgccccgaatgtggcaagtccttcagccagagagctcatctggagaggcatcaaagaacacacaccggagagaaaccttacaagtgtcccgagtgtggaaagagcttctccagaagggacgagctgaacgtccaccaaagaacccataccggcgaaaagccctataaatgccccgagtgtggaaaatccttttctagatccgaccatctgacaacccaccagaggacccataccggagagaagccctacaaatgccccgagtgtggaaaaagcttctctagaaacgatgctctgacagagcaccaaaggacccacaccggcaaaaagaccagcgctagcggcagcggcggcggcagcggcggcaagcggcccgccgccaccaagaaggccggccaggccaagaagaagaagggcagctacccctacgacgtgcccgactacgcctgagcggccgcttaattaagctgccttctgcggggcttgccttctggccatgcccttcttctctcccttgcacctgtacctcttggtctttgaataaagcctgagtaggaagtctagaaaaaaaaaaaaaaaaaaaaaaaaaaaaaaaaaaaaaaaaaaaaaaaaaaaaaaaaaaaaaaaaaaaaaaaaaaaaaaaa

SEQ ID NO: 221 - DNA, 2668 bp, Artificial Sequence
  Description of Artificial Sequence: Synthetic polynucleotide
aggaaataagagagaaaagaagagtaagaagaaatataagagccaccatggcccccaagaagaagcggaaggtgggcatccacggcgtgcccgccgccggcagcagcggatccctggagcccggcgaaaagccttacaagtgccccgagtgtggcaaatcctttagcaccaccggaaatctgaccgtccaccagagaacacataccggcgagaaaccctacaagtgtcccgagtgcggcaaatccttcagccagctggcccatctgagagcccatcaaaggacccataccggcgagaaaccttacaagtgtcccgaatgtggaaagtcctttagcagccccgccgatctgacaagacatcaaagaacccacaccggcgagaagccctataaatgtcccgagtgtggaaagtccttcagccagagcggcaatctgaccgagcatcaaagaacccataccggcgaaaagccctataagtgccccgaatgcggaaaaagcttctccacaagcggcgagctggtgagacaccaaaggacacataccggcgaaaagccttataaatgccccgagtgcggcaagagcttctctagaaaggacaatctgaagaaccaccaaagaacacacaccggcgagaagccctacaaatgccccgagtgcggcaagagctttagccagtccagcaacctcgtgagacatcagaggacacataccggaaaaaagaccagcgctagcggcagcggcggcggcagcggcggcaaccacgaccaggagttcgacccccccaaggtgtacccccccgtgcccgccgagaagcggaagcccatccgggtgctgagcctgttcgacggcatcgccaccggcctgctggtgctgaaggacctgggcatccaggtggaccggtacatcgccagcgaggtgtgcgaggacagcatcaccgtgggcatggtgcggcaccagggcaagatcatgtacgtgggcgacgtgcggagcgtgacccagaagcacatccaggagtggggccccttcgacctggtgatcggcggcagcccctgcaacgacctgagcatcgtgaaccccgcccggaagggcctgtacgagggcaccggccggctgttcttcgagttctaccggctgctgcacgacgcccggcccaaggagggcgacgaccggcccttcttctggctgttcgagaacgtggtggccatgggcgtgagcgacaagcgggacatcagccggttcctggagagcaaccccgtgatgatcgacgccaaggaggtgagcgccgcccaccgggcccggtacttctggggcaacctgcccggcatgaaccggcccctggccagcaccgtgaacgacaagctggagctgcaggagtgcctggagcacggccggatcgccaagttcagcaaggtgcggaccatcaccacccggagcaacagcatcaagcagggcaaggaccagcacttccccgtgttcatgaacgagaaggaggacatcctgtggtgcaccgagatggagcgggtgttcggcttccccgtgcactacaccgacgtgagcaacatgagccggctggcccggcagcggctgctgggccggagctggagcgtgcccgtgatccggcacctgttcgcccccctgaaggagtacttcgcctgcgtgagcagcggcaacagcaacgccaacagccggggccccagcttcagcagcggcctggtgcccctgagcctgcggggcagccacatgaatcctctggagatgttcgagacagtgcccgtgtggagaaggcaacccgtgagggtgctgagcctcttcgaggacattaagaaggagctgacctctctgggctttctggaatccggcagcgaccccggccagctgaaacacgtggtggacgtgaccgacacagtgaggaaggacgtggaagagtggggcccctttgacctcgtgtatggagccacacctcctctcggccacacatgcgataggcctcccagctggtatctcttccagttccacagactgctccagtacgccagacctaagcccggcagccccagacccttcttctggatgttcgtggacaatctggtgctgaacaaggaggatctggatgtggccagcagatttctggagatggaacccgtgacaatccccgacgtgcatggcggctctctgcagaacgccgtgagagtgtggtccaacatccccgccattagaagcagacactgggctctggtgagcgaggaggaactgtctctgctggcccagaataagcagtcctccaagctggccgccaagtggcccaccaagctggtgaagaactgctttctgcctctgagggagtatttcaagtatttcagcaccgaactgaccagcagcctgagcggcggcaagcggcccgccgccaccaagaaggccggccaggccaagaagaagaagggcagctacccctacgacgtgcccgactacgcctgagcggccgcttaattaagctgccttctgcggggcttgccttctggccatgcccttcttctctcccttgcacctgtacctcttggtctttgaataaagcctgagtaggaagtctagaaaaaaaaaaaaaaaaaaaaaaaaaaaaaaaaaaaaaaaaaaaaaaaaaaaaaaaaaaaaaaaaaaaaaaaaaaaaaaaa

SEQ ID NO: 222 - DNA, 3262 bp, Artificial Sequence
  Description of Artificial Sequence: Synthetic polynucleotide
aggaaataagagagaaaagaagagtaagaagaaatataagagccaccatggcccccaagaagaagcggaaggtgggcggcagcggcggcagcggccagaccggcaagaagagcgagaagggccccgtgtgctggcggaagcgggtgaagagcgagtacatgcggctgcggcagctgaagcggttccggcgggccgacgaggtgaagagcatgttcagcagcaaccggcagaagatcctggagcggaccgagatcctgaaccaggagtggaagcagcggcgaatccagcccgtgcacatcctgaccagcgtgagcagcctgcggggcacccgggagtgcagcgtgaccagcgacctggacttccccacccaggtgatccccctaaagaccctgaacgccgtggccagcgtgcccatcatgtacagctggagccccctgcagcagaacttcatggtggaggacgagaccgtgctgcacaacatcccctacatgggcgacgaggtgctggaccaggacggcaccttcatcgaggagctgatcaagaactacgacggcaaggtgcacggcgaccgggagtgcggcttcatcaacgacgagatcttcgtggagctggtgaacgccctgggccagtacaacgacgacgacgacgacgacgacggcgacgaccccgaggagcgggaggagaagcagaaggacctggaggaccaccgggacgacaaggagagccggcccccccggaagttccccagcgacaagatcttcgaggccatcagcagcatgttccccgacaagggcaccgccgaggagctgaaggagaagtacaaggagctgaccgagcagcagctgcccggcgccctgccccccgagtgcacccccaacatcgacggccccaacgccaagagcgtgcagcgggagcagagcctgcacagcttccacaccctgttctgccggcggtgcttcaagtacgactgcttcctgcaccccttccacgccacccccaacacctacaagcggaagaacaccgagaccgccctggacaacaagccctgcggcccccagtgctaccagcacctggagggcgccaaggagttcgccgccgccctgaccgccgagcggatcaagaccccccccaagcggcccggcggccggcggcggggccggctgcccaacaacagcagccggcccagcacccccaccatcaacgtgctggagagcaaggacaccgacagcgaccgggaggccggcaccgagaccggcggcgagaacaacgacaaggaggaggaggagaagaaggacgagaccagcagcagcagcgaggccaacagccggtgccagacccccatcaagatgaagcccaacatcgagccccccgagaacgtggagtggagcggcgccgaggccagcatgttccgggtgctgatcggcacctactacgacaacttctgcgccatcgcccggctgatcggcaccaagacctgccggcaggtgtacgagttccgggtgaaggagagcagcatcatcgcccccgcccccgccgaggacgtggacacccccccccggaagaagaagcggaagcaccggctgtgggccgcccactgccggaagatccagctgaagaaggacggcagcagcaaccacgtgtacaactaccagccctgcgaccacccccggcagccctgcgacagcagctgcccctgcgtgatcgcccagaacttctgcgagaagttctgccagtgcagcagcgagtgccagaaccggttccccggctgccggtgcaaggcccagtgcaacaccaagcagtgcccctgctacctggccgtgcgggagtgcgaccccgacctgtgcctgacctgcggcgccgccgaccactgggacagcaagaacgtgagctgcaagaactgcagcatccagcggggcagcaagaagcacctgctgctggcccccagcgacgtggccggctggggcatcttcatcaaggaccccgtgcagaagaacgagttcatcagcgagtactgcggcgagatcatcagccaggacgaggccgaccggcggggcaaggtgtacgacaagtacatgtgcagcttcctgttcaacctgaacaacgacttcgtggtggacgccacccggaagggcaacaagatccggttcgccaaccacagcgtgaaccccaactgctacgccaaggtgatgatggtgaacggcgaccaccggatcggcatcttcgccaagcgggccatccagaccggcgaggagctgttcttcgactaccggtacagccaggccgacgccctgaagtacgtgggcatcgagcgggagatggagatccccggcagcagcggatccctggagcccggcgaaaagccttacaagtgccccgagtgtggcaaatcctttagcaccaccggaaatctgaccgtccaccagagaacacataccggcgagaaaccctacaagtgtcccgagtgcggcaaatccttcagccagctggcccatctgagagcccatcaaaggacccataccggcgagaaaccttacaagtgtcccgaatgtggaaagtcctttagcagccccgccgatctgacaagacatcaaagaacccacaccggcgagaagccctataaatgtcccgagtgtggaaagtccttcagccagagcggcaatctgaccgagcatcaaagaacccataccggcgaaaagccctataagtgccccgaatgcggaaaaagcttctccacaagcggcgagctggtgagacaccaaaggacacataccggcgaaaagccttataaatgccccgagtgcggcaagagcttctctagaaaggacaatctgaagaaccaccaaagaacacacaccggcgagaagccctacaaatgccccgagtgcggcaagagctttagccagtccagcaacctcgtgagacatcagaggacacataccggaaaaaagaccagcgctagcggcagcggcggcggcagcggcggcaagcggcccgccgccaccaagaaggccggccaggccaagaagaagaagggcagctacccctacgacgtgcccgactacgcctgagcggccgcttaattaagctgccttctgcggggcttgccttctggccatgcccttcttctctcccttgcacctgtacctcttggtctttgaataaagcctgagtaggaagtctagaaaaaaaaaaaaaaaaaaaaaaaaaaaaaaaaaaaaaaaaaaaaaaaaaaaaaaaaaaaaaaaaaaaaaaaaaaaaaaaa

SEQ ID NO: 223 - DNA, 3262 bp, Artificial Sequence
  Description of Artificial Sequence: Synthetic polynucleotide
aggaaataagagagaaaagaagagtaagaagaaatataagagccaccatggcccccaagaagaagcggaaggtgggcggcagcggcggcagcggccagaccggcaagaagagcgagaagggccccgtgtgctggcggaagcgggtgaagagcgagtacatgcggctgcggcagctgaagcggttccggcgggccgacgaggtgaagagcatgttcagcagcaaccggcagaagatcctggagcggaccgagatcctgaaccaggagtggaagcagcggcgaatccagcccgtgcacatcctgaccagcgtgagcagcctgcggggcacccgggagtgcagcgtgaccagcgacctggacttccccacccaggtgatccccctaaagaccctgaacgccgtggccagcgtgcccatcatgtacagctggagccccctgcagcagaacttcatggtggaggacgagaccgtgctgcacaacatcccctacatgggcgacgaggtgctggaccaggacggcaccttcatcgaggagctgatcaagaactacgacggcaaggtgcacggcgaccgggagtgcggcttcatcaacgacgagatcttcgtggagctggtgaacgccctgggccagtacaacgacgacgacgacgacgacgacggcgacgaccccgaggagcgggaggagaagcagaaggacctggaggaccaccgggacgacaaggagagccggcccccccggaagttccccagcgacaagatcttcgaggccatcagcagcatgttccccgacaagggcaccgccgaggagctgaaggagaagtacaaggagctgaccgagcagcagctgcccggcgccctgccccccgagtgcacccccaacatcgacggccccaacgccaagagcgtgcagcgggagcagagcctgcacagcttccacaccctgttctgccggcggtgcttcaagtacgactgcttcctgcaccccttccacgccacccccaacacctacaagcggaagaacaccgagaccgccctggacaacaagccctgcggcccccagtgctaccagcacctggagggcgccaaggagttcgccgccgccctgaccgccgagcggatcaagaccccccccaagcggcccggcggccggcggcggggccggctgcccaacaacagcagccggcccagcacccccaccatcaacgtgctggagagcaaggacaccgacagcgaccgggaggccggcaccgagaccggcggcgagaacaacgacaaggaggaggaggagaagaaggacgagaccagcagcagcagcgaggccaacagccggtgccagacccccatcaagatgaagcccaacatcgagccccccgagaacgtggagtggagcggcgccgaggccagcatgttccgggtgctgatcggcacctactacgacaacttctgcgccatcgcccggctgatcggcaccaagacctgccggcaggtgtacgagttccgggtgaaggagagcagcatcatcgcccccgcccccgccgaggacgtggacacccccccccggaagaagaagcggaagcaccggctgtgggccgcccactgccggaagatccagctgaagaaggacggcagcagcaaccacgtgtacaactaccagccctgcgaccacccccggcagccctgcgacagcagctgcccctgcgtgatcgcccagaacttctgcgagaagttctgccagtgcagcagcgagtgccagaaccggttccccggctgccggtgcaaggcccagtgcaacaccaagcagtgcccctgctacctggccgtgcgggagtgcgaccccgacctgtgcctgacctgcggcgccgccgaccactgggacagcaagaacgtgagctgcaagaactgcagcatccagcggggcagcaagaagcacctgctgctggcccccagcgacgtggccggctggggcatcttcatcaaggaccccgtgcagaagaacgagttcatcagcgagtactgcggcgagatcatcagccaggacgaggccgaccggcggggcaaggtgtacgacaagtacatgtgcagcttcctgttcaacctgaacaacgacttcgtggtggacgccacccggaagggcaacaagatccggttcgccaaccacagcgtgaaccccaactgctacgccaaggtgatgatggtgaacggcgaccaccggatcggcatcttcgccaagcgggccatccagaccggcgaggagctgttcttcgactaccggtacagccaggccgacgccctgaagtacgtgggcatcgagcgggagatggagatccccggcagcagcggatccctggagcccggcgaaaaaccctataagtgccccgagtgcggcaagagctttagcgatcccggccatctggtgaggcatcagaggacccacaccggcgaaaagccttacaaatgccccgagtgtggaaaaagcttcagcagaagcgatcatctgaccacccatcagaggacacataccggcgagaagccttataaatgccccgaatgtggaaagagcttctccagaagcgaccatctgaccaaccaccagaggacccataccggagaaaaaccttacaaatgccccgagtgtggaaagtccttcagctcccccgccgatctgacaagacatcagagaacccacaccggcgaaaaaccttataaatgtcccgagtgtggcaaaagcttctccgacaagaaggatctgacaagacaccaaaggacccacaccggcgagaaaccttataaatgtcccgaatgcggaaaaagctttagcagaaacgacgctctgaccgaacaccagagaacacataccggagagaaaccctataaatgtcccgagtgcggaaaatccttcagcaccaccggcgctctgacagagcatcagaggacacacaccggcaaaaagacctccgctagcggcagcggcggcggcagcggcggcaagcggcccgccgccaccaagaaggccggccaggccaagaagaagaagggcagctacccctacgacgtgcccgactacgcctgagcggccgcttaattaagctgccttctgcggggcttgccttctggccatgcccttcttctctcccttgcacctgtacctcttggtctttgaataaagcctgagtaggaagtctagaaaaaaaaaaaaaaaaaaaaaaaaaaaaaaaaaaaaaaaaaaaaaaaaaaaaaaaaaaaaaaaaaaaaaaaaaaaaaaaa

SEQ ID NO: 224 - DNA, 1897 bp, Artificial Sequence
  Description of Artificial Sequence: Synthetic polynucleotide
aggaaataagagagaaaagaagagtaagaagaaatataagagccaccatggcccccaagaagaagcggaaggtgggcatccacggcgtgcccgccgcctcgggcgggggtggctcaggaaatagggctatcagaaccgagaagatcatctgtagggacgtggctagaggctacgagaacgtgcccattccttgcgtgaatggcgtggatggcgaaccttgccccgaggactacaaatacatctccgagaactgcgaaaccagcacaatgaacatcgacagaaacatcacccacctccagcactgcacatgtgtggatgactgctcctccagcaactgtctgtgcggccagctctccatcagatgctggtacgacaaggacggcagactgctgcaagagttcaacaagatcgaaccccctctcatcttcgagtgtaaccaagcttgcagctgctggagaaactgcaagaatagagtggtccagagcggcatcaaggtgagactgcaactgtacagaaccgccaagatgggatggggagtgagggctctgcaaaccattccccaaggcaccttcatctgcgaatacgtgggcgaactgatctccgacgccgaagctgacgtgagagaggacgacagctatctcttcgatctggacaataaggacggcgaggtgtactgcatcgacgctagatattacggcaacatctctagattcatcaaccacctctgcgatcccaacatcattcccgtgagggtgttcatgctgcaccaagatctgaggttccctagaatcgccttcttcagctctagagacatcagaaccggcgaggagctgggcttcgattacggcgatagattctgggacatcaagtccaagtacttcacatgccagtgcggcagcgagaagtgtaagcacagcgctgaggccattgctctggagcagtctagactggccagactggatggcagcagcggatccctggagcccggagaaaagccttacaaatgccccgagtgcggcaagtccttcagccagctggctcatctgagagctcatcaaaggacccacaccggcgagaagccctataagtgccccgagtgcggaaaatccttctcccagagcagcaatctcgtcagacaccagaggacccacaccggcgagaaaccttacaagtgtcccgaatgtggaaagtccttctcccaaaagagctctctgatcgcccatcagagaacacataccggcgaaaaaccctacaagtgccccgagtgtggcaaaagcttttccaccaccggcaatctgaccgtgcatcaaagaacccacaccggcgaaaaaccctacaaatgccccgagtgtggcaaatccttctccgaccccggccatctggtgaggcaccagaggacacacaccggcgagaaaccttataaatgtcccgaatgcggcaagtcctttagcaccagcggctctctggtgagacatcagaggacacataccggcgaaaagccttacaagtgtcccgagtgtggcaaaagcttcagccagaacagcacactgacagagcatcagagaacccataccggcaaaaagaccagcgctagcggcagcggcggcggcagcggcggcaagcggcccgccgccaccaagaaggccggccaggccaagaagaagaagggcagctacccctacgacgtgcccgactacgcctgagcggccgcttaattaagctgccttctgcggggcttgccttctggccatgcccttcttctctcccttgcacctgtacctcttggtctttgaataaagcctgagtaggaagtctagaaaaaaaaaaaaaaaaaaaaaaaaaaaaaaaaaaaaaaaaaaaaaaaaaaaaaaaaaaaaaaaaaaaaaaaaaaaaaaaa

SEQ ID NO: 225 - DNA, 1897 bp, Artificial Sequence
  Description of Artificial Sequence: Synthetic polynucleotide
aggaaataagagagaaaagaagagtaagaagaaatataagagccaccatggcccccaagaagaagcggaaggtgggcatccacggcgtgcccgccgcctcgggcgggggtggctcaggaaatagggctatcagaaccgagaagatcatctgtagggacgtggctagaggctacgagaacgtgcccattccttgcgtgaatggcgtggatggcgaaccttgccccgaggactacaaatacatctccgagaactgcgaaaccagcacaatgaacatcgacagaaacatcacccacctccagcactgcacatgtgtggatgactgctcctccagcaactgtctgtgcggccagctctccatcagatgctggtacgacaaggacggcagactgctgcaagagttcaacaagatcgaaccccctctcatcttcgagtgtaaccaagcttgcagctgctggagaaactgcaagaatagagtggtccagagcggcatcaaggtgagactgcaactgtacagaaccgccaagatgggatggggagtgagggctctgcaaaccattccccaaggcaccttcatctgcgaatacgtgggcgaactgatctccgacgccgaagctgacgtgagagaggacgacagctatctcttcgatctggacaataaggacggcgaggtgtactgcatcgacgctagatattacggcaacatctctagattcatcaaccacctctgcgatcccaacatcattcccgtgagggtgttcatgctgcaccaagatctgaggttccctagaatcgccttcttcagctctagagacatcagaaccggcgaggagctgggcttcgattacggcgatagattctgggacatcaagtccaagtacttcacatgccagtgcggcagcgagaagtgtaagcacagcgctgaggccattgctctggagcagtctagactggccagactggatggcagcagcggatccctggagcccggcgaaaagccttacaagtgccccgagtgtggcaaatcctttagcaccaccggaaatctgaccgtccaccagagaacacataccggcgagaaaccctacaagtgtcccgagtgcggcaaatccttcagccagctggcccatctgagagcccatcaaaggacccataccggcgagaaaccttacaagtgtcccgaatgtggaaagtcctttagcagccccgccgatctgacaagacatcaaagaacccacaccggcgagaagccctataaatgtcccgagtgtggaaagtccttcagccagagcggcaatctgaccgagcatcaaagaacccataccggcgaaaagccctataagtgccccgaatgcggaaaaagcttctccacaagcggcgagctggtgagacaccaaaggacacataccggcgaaaagccttataaatgccccgagtgcggcaagagcttctctagaaaggacaatctgaagaaccaccaaagaacacacaccggcgagaagccctacaaatgccccgagtgcggcaagagctttagccagtccagcaacctcgtgagacatcagaggacacataccggaaaaaagaccagcgctagcggcagcggcggcggcagcggcggcaagcggcccgccgccaccaagaaggccggccaggccaagaagaagaagggcagctacccctacgacgtgcccgactacgcctgagcggccgcttaattaagctgccttctgcggggcttgccttctggccatgcccttcttctctcccttgcacctgtacctcttggtctttgaataaagcctgagtaggaagtctagaaaaaaaaaaaaaaaaaaaaaaaaaaaaaaaaaaaaaaaaaaaaaaaaaaaaaaaaaaaaaaaaaaaaaaaaaaaaaaaa

SEQ ID NO: 226 - DNA, 2179 bp, Artificial Sequence
  Description of Artificial Sequence: Synthetic polynucleotide
aggaaataagagagaaaagaagagtaagaagaaatataagagccaccatggcccccaagaagaagcggaaggtgggcatccacggcgtgcccgccgccggcagcagcggatccctggagcccggagaaaagccttacaaatgccccgagtgcggcaagtccttcagccagctggctcatctgagagctcatcaaaggacccacaccggcgagaagccctataagtgccccgagtgcggaaaatccttctcccagagcagcaatctcgtcagacaccagaggacccacaccggcgagaaaccttacaagtgtcccgaatgtggaaagtccttctcccaaaagagctctctgatcgcccatcagagaacacataccggcgaaaaaccctacaagtgccccgagtgtggcaaaagcttttccaccaccggcaatctgaccgtgcatcaaagaacccacaccggcgaaaaaccctacaaatgccccgagtgtggcaaatccttctccgaccccggccatctggtgaggcaccagaggacacacaccggcgagaaaccttataaatgtcccgaatgcggcaagtcctttagcaccagcggctctctggtgagacatcagaggacacataccggcgaaaagccttacaagtgtcccgagtgtggcaaaagcttcagccagaacagcacactgacagagcatcagagaacccataccggcaaaaagaccagcgctagcggcagcggcggcggcagcggcggcgaggagcccgaggagcccgccgatagcggacaatctctggtgcccgtctacatctacagccccgaatatgtgagcatgtgtgattccctcgccaagatccctaagagagccagcatggtgcattctctgatcgaggcctacgctctgcataagcaaatgaggatcgtgaagcccaaggtcgccagcatggaagagatggccacctttcacaccgatgcctacctccaacatctccagaaggtgtcccaagagggcgacgacgaccaccccgactccattgagtacggactgggctatgattgccccgccaccgagggcatctttgactatgccgccgctatcggcggagctaccatcacagccgcccagtgtctgattgatggcatgtgcaaggtcgccatcaactggtccggaggctggcatcatgccaagaaggatgaggcctccggcttctgttatctgaatgacgccgtgctgggcattctgagactgaggaggaaattcgagaggattctgtacgtggatctggatctgcatcacggagatggagtcgaagatgccttcagcttcaccagcaaggtgatgacagtctctctgcacaagttctcccccggcttctttcccggaaccggcgacgtgtccgacgtgggactgggcaagggaaggtactacagcgtgaacgtgcccattcaagacggcatccaagacgagaagtactaccagatctgcgagtccgtgctcaaggaggtctaccaagccttcaatcctaaggctgtcgtgctccaactgggagctgataccattgctggcgatcccatgtgcagcttcaatatgacacccgtcggaatcggcaagtgcctcaagtacatcctccagtggcagctcgccaccctcattctcggaggaggcggatacaatctggctaataccgccagatgctggacctatctgaccggcgtgattctgggcaaaacactgagcagcgaaatccccgaccacgagtttttcaccgcttacggccccgactacgtgctggagatcacccccagctgcagacccgatagaaacgaaccccatagaatccagcaaattctgaactatatcaagggcaacctcaagcacgtcgtgggaggtggcggatcgggaaagcggcccgccgccaccaagaaggccggtcaggccaagaagaagaagggcagctacccctacgacgtgcccgactacgcctgagcggccgcttaattaagctgccttctgcggggcttgccttctggccatgcccttcttctctcccttgcacctgtacctcttggtctttgaataaagcctgagtaggaagtctagaaaaaaaaaaaaaaaaaaaaaaaaaaaaaaaaaaaaaaaaaaaaaaaaaaaaaaaaaaaaaaaaaaaaaaaaaaaaaaaa

SEQ ID NO: 227 - DNA, 1897 bp, Artificial Sequence
  Description of Artificial Sequence: Synthetic polynucleotide
aggaaataagagagaaaagaagagtaagaagaaatataagagccaccatggcccccaagaagaagcggaaggtgggcatccacggcgtgcccgccgcctcgggcgggggtggctcaggaaatagggctatcagaaccgagaagatcatctgtagggacgtggctagaggctacgagaacgtgcccattccttgcgtgaatggcgtggatggcgaaccttgccccgaggactacaaatacatctccgagaactgcgaaaccagcacaatgaacatcgacagaaacatcacccacctccagcactgcacatgtgtggatgactgctcctccagcaactgtctgtgcggccagctctccatcagatgctggtacgacaaggacggcagactgctgcaagagttcaacaagatcgaaccccctctcatcttcgagtgtaaccaagcttgcagctgctggagaaactgcaagaatagagtggtccagagcggcatcaaggtgagactgcaactgtacagaaccgccaagatgggatggggagtgagggctctgcaaaccattccccaaggcaccttcatctgcgaatacgtgggcgaactgatctccgacgccgaagctgacgtgagagaggacgacagctatctcttcgatctggacaataaggacggcgaggtgtactgcatcgacgctagatattacggcaacatctctagattcatcaaccacctctgcgatcccaacatcattcccgtgagggtgttcatgctgcaccaagatctgaggttccctagaatcgccttcttcagctctagagacatcagaaccggcgaggagctgggcttcgattacggcgatagattctgggacatcaagtccaagtacttcacatgccagtgcggcagcgagaagtgtaagcacagcgctgaggccattgctctggagcagtctagactggccagactggatggcagcagcggatccctggagcccggcgaaaagccttacaagtgtcccgagtgcggaaagagcttcagcagagccgataatctgaccgagcaccaaaggacccacaccggagagaagccttataagtgtcccgaatgcggcaaaagcttttctagaagcgatcatctgaccaaccaccagaggacacacaccggagaaaaaccttacaaatgccccgagtgcggcaaaagcttctcccagagcagcaatctggtgagacaccaaaggacccacaccggcgaaaaaccctataaatgccccgaatgtggcaagagctttagcacatccggcgagctggtgaggcatcaaagaacacataccggcgagaagccctacaagtgccccgagtgtggaaaaagcttcagcacccacctcgatctgatcagacaccagaggacccataccggagagaaaccctacaaatgtcccgagtgcggaaagtcctttagccagctggcccatctgagagctcatcaaaggacacacaccggcgagaagccttacaagtgtcccgagtgcggaaaatccttctcccaactggcccatctgagggcccaccagagaacccacaccggcaaaaagacctccgctagcggcagcggcggcggcagcggcggcaagcggcccgccgccaccaagaaggccggccaggccaagaagaagaagggcagctacccctacgacgtgcccgactacgcctgagcggccgcttaattaagctgccttctgcggggcttgccttctggccatgcccttcttctctcccttgcacctgtacctcttggtctttgaataaagcctgagtaggaagtctagaaaaaaaaaaaaaaaaaaaaaaaaaaaaaaaaaaaaaaaaaaaaaaaaaaaaaaaaaaaaaaaaaaaaaaaaaaaaaaaa

SEQ ID NO: 228 - DNA, 1897 bp, Artificial Sequence
  Description of Artificial Sequence: Synthetic polynucleotide
aggaaataagagagaaaagaagagtaagaagaaatataagagccaccatggcccccaagaagaagcggaaggtgggcatccacggcgtgcccgccgcctcgggcgggggtggctcaggaaatagggctatcagaaccgagaagatcatctgtagggacgtggctagaggctacgagaacgtgcccattccttgcgtgaatggcgtggatggcgaaccttgccccgaggactacaaatacatctccgagaactgcgaaaccagcacaatgaacatcgacagaaacatcacccacctccagcactgcacatgtgtggatgactgctcctccagcaactgtctgtgcggccagctctccatcagatgctggtacgacaaggacggcagactgctgcaagagttcaacaagatcgaaccccctctcatcttcgagtgtaaccaagcttgcagctgctggagaaactgcaagaatagagtggtccagagcggcatcaaggtgagactgcaactgtacagaaccgccaagatgggatggggagtgagggctctgcaaaccattccccaaggcaccttcatctgcgaatacgtgggcgaactgatctccgacgccgaagctgacgtgagagaggacgacagctatctcttcgatctggacaataaggacggcgaggtgtactgcatcgacgctagatattacggcaacatctctagattcatcaaccacctctgcgatcccaacatcattcccgtgagggtgttcatgctgcaccaagatctgaggttccctagaatcgccttcttcagctctagagacatcagaaccggcgaggagctgggcttcgattacggcgatagattctgggacatcaagtccaagtacttcacatgccagtgcggcagcgagaagtgtaagcacagcgctgaggccattgctctggagcagtctagactggccagactggatggcagcagcggatccctggagcccggcgaaaaaccctataaatgccccgagtgtggcaagagcttttccgaccccggacacctcgtgaggcatcagagaacacataccggcgagaaaccctacaagtgccccgaatgcggcaaatccttctctagaaaggacaatctgaaaaaccatcaaagaacccataccggcgagaagccctataaatgtcccgagtgtggaaagagcttcagccacaagaacgctctgcagaaccatcagaggacccataccggcgaaaagccttataagtgccccgagtgcggaaaatccttttctagaagggacgagctgaatgtgcaccaaaggacacataccggagagaaaccctacaaatgccccgagtgcggcaagtccttcagcacctccggcaatctggtgaggcaccaaaggacacacaccggcgaaaaaccttacaagtgtcccgagtgcggaaaaagcttttcccagaacagcacactgaccgaacaccaaaggacccacaccggagagaaaccttataaatgtcccgagtgtggaaagtcctttagccagtccggcaatctgacagagcatcaaagaacccacaccggcaaaaagacctccgctagcggcagcggcggcggcagcggcggcaagcggcccgccgccaccaagaaggccggccaggccaagaagaagaagggcagctacccctacgacgtgcccgactacgcctgagcggccgcttaattaagctgccttctgcggggcttgccttctggccatgcccttcttctctcccttgcacctgtacctcttggtctttgaataaagcctgagtaggaagtctagaaaaaaaaaaaaaaaaaaaaaaaaaaaaaaaaaaaaaaaaaaaaaaaaaaaaaaaaaaaaaaaaaaaaaaaaaaaaaaaa

SEQ ID NO: 229 - DNA, 1897 bp, Artificial Sequence
  Description of Artificial Sequence: Synthetic polynucleotide
aggaaataagagagaaaagaagagtaagaagaaatataagagccaccatggcccccaagaagaagcggaaggtgggcatccacggcgtgcccgccgcctcgggcgggggtggctcaggaaatagggctatcagaaccgagaagatcatctgtagggacgtggctagaggctacgagaacgtgcccattccttgcgtgaatggcgtggatggcgaaccttgccccgaggactacaaatacatctccgagaactgcgaaaccagcacaatgaacatcgacagaaacatcacccacctccagcactgcacatgtgtggatgactgctcctccagcaactgtctgtgcggccagctctccatcagatgctggtacgacaaggacggcagactgctgcaagagttcaacaagatcgaaccccctctcatcttcgagtgtaaccaagcttgcagctgctggagaaactgcaagaatagagtggtccagagcggcatcaaggtgagactgcaactgtacagaaccgccaagatgggatggggagtgagggctctgcaaaccattccccaaggcaccttcatctgcgaatacgtgggcgaactgatctccgacgccgaagctgacgtgagagaggacgacagctatctcttcgatctggacaataaggacggcgaggtgtactgcatcgacgctagatattacggcaacatctctagattcatcaaccacctctgcgatcccaacatcattcccgtgagggtgttcatgctgcaccaagatctgaggttccctagaatcgccttcttcagctctagagacatcagaaccggcgaggagctgggcttcgattacggcgatagattctgggacatcaagtccaagtacttcacatgccagtgcggcagcgagaagtgtaagcacagcgctgaggccattgctctggagcagtctagactggccagactggatggcagcagcggatccctggagcccggcgaaaaaccctataagtgccccgagtgcggcaagagctttagcgatcccggccatctggtgaggcatcagaggacccacaccggcgaaaagccttacaaatgccccgagtgtggaaaaagcttcagcagaagcgatcatctgaccacccatcagaggacacataccggcgagaagccttataaatgccccgaatgtggaaagagcttctccagaagcgaccatctgaccaaccaccagaggacccataccggagaaaaaccttacaaatgccccgagtgtggaaagtccttcagctcccccgccgatctgacaagacatcagagaacccacaccggcgaaaaaccttataaatgtcccgagtgtggcaaaagcttctccgacaagaaggatctgacaagacaccaaaggacccacaccggcgagaaaccttataaatgtcccgaatgcggaaaaagctttagcagaaacgacgctctgaccgaacaccagagaacacataccggagagaaaccctataaatgtcccgagtgcggaaaatccttcagcaccaccggcgctctgacagagcatcagaggacacacaccggcaaaaagacctccgctagcggcagcggcggcggcagcggcggcaagcggcccgccgccaccaagaaggccggccaggccaagaagaagaagggcagctacccctacgacgtgcccgactacgcctgagcggccgcttaattaagctgccttctgcggggcttgccttctggccatgcccttcttctctcccttgcacctgtacctcttggtctttgaataaagcctgagtaggaagtctagaaaaaaaaaaaaaaaaaaaaaaaaaaaaaaaaaaaaaaaaaaaaaaaaaaaaaaaaaaaaaaaaaaaaaaaaaaaaaaaa

SEQ ID NO: 230 - DNA, 1897 bp, Artificial Sequence
  Description of Artificial Sequence: Synthetic polynucleotide
aggaaataagagagaaaagaagagtaagaagaaatataagagccaccatggcccccaagaagaagcggaaggtgggcatccacggcgtgcccgccgcctcgggcgggggtggctcaggaaatagggctatcagaaccgagaagatcatctgtagggacgtggctagaggctacgagaacgtgcccattccttgcgtgaatggcgtggatggcgaaccttgccccgaggactacaaatacatctccgagaactgcgaaaccagcacaatgaacatcgacagaaacatcacccacctccagcactgcacatgtgtggatgactgctcctccagcaactgtctgtgcggccagctctccatcagatgctggtacgacaaggacggcagactgctgcaagagttcaacaagatcgaaccccctctcatcttcgagtgtaaccaagcttgcagctgctggagaaactgcaagaatagagtggtccagagcggcatcaaggtgagactgcaactgtacagaaccgccaagatgggatggggagtgagggctctgcaaaccattccccaaggcaccttcatctgcgaatacgtgggcgaactgatctccgacgccgaagctgacgtgagagaggacgacagctatctcttcgatctggacaataaggacggcgaggtgtactgcatcgacgctagatattacggcaacatctctagattcatcaaccacctctgcgatcccaacatcattcccgtgagggtgttcatgctgcaccaagatctgaggttccctagaatcgccttcttcagctctagagacatcagaaccggcgaggagctgggcttcgattacggcgatagattctgggacatcaagtccaagtacttcacatgccagtgcggcagcgagaagtgtaagcacagcgctgaggccattgctctggagcagtctagactggccagactggatggcagcagcggatccctggagcccggcgaaaagccttacaaatgtcccgaatgcggaaagagcttcagcagagccgacaatctgaccgaacatcagagaacccataccggagaaaaaccttacaaatgtcccgagtgcggcaaaagcttctcccaagccggacatctggccagccaccaaaggacacataccggcgagaaaccctacaagtgccccgagtgcggcaagtccttctctagatccgatgagctggtcagacatcagagaacccataccggcgagaagccttataagtgccccgaatgtggcaagtccttcagccagagagctcatctggagaggcatcaaagaacacacaccggagagaaaccttacaagtgtcccgagtgtggaaagagcttctccagaagggacgagctgaacgtccaccaaagaacccataccggcgaaaagccctataaatgccccgagtgtggaaaatccttttctagatccgaccatctgacaacccaccagaggacccataccggagagaagccctacaaatgccccgagtgtggaaaaagcttctctagaaacgatgctctgacagagcaccaaaggacccacaccggcaaaaagaccagcgctagcggcagcggcggcggcagcggcggcaagcggcccgccgccaccaagaaggccggccaggccaagaagaagaagggcagctacccctacgacgtgcccgactacgcctgagcggccgcttaattaagctgccttctgcggggcttgccttctggccatgcccttcttctctcccttgcacctgtacctcttggtctttgaataaagcctgagtaggaagtctagaaaaaaaaaaaaaaaaaaaaaaaaaaaaaaaaaaaaaaaaaaaaaaaaaaaaaaaaaaaaaaaaaaaaaaaaaaaaaaaa

SEQ ID NO: 231 - DNA, 2668 bp, Artificial Sequence
  Description of Artificial Sequence: Synthetic polynucleotide
aggaaataagagagaaaagaagagtaagaagaaatataagagccaccatggcccccaagaagaagcggaaggtgggcatccacggcgtgcccgccgccggcagcagcggatccctggagcccggcgaaaaaccctataagtgccccgagtgcggcaagagctttagcgatcccggccatctggtgaggcatcagaggacccacaccggcgaaaagccttacaaatgccccgagtgtggaaaaagcttcagcagaagcgatcatctgaccacccatcagaggacacataccggcgagaagccttataaatgccccgaatgtggaaagagcttctccagaagcgaccatctgaccaaccaccagaggacccataccggagaaaaaccttacaaatgccccgagtgtggaaagtccttcagctcccccgccgatctgacaagacatcagagaacccacaccggcgaaaaaccttataaatgtcccgagtgtggcaaaagcttctccgacaagaaggatctgacaagacaccaaaggacccacaccggcgagaaaccttataaatgtcccgaatgcggaaaaagctttagcagaaacgacgctctgaccgaacaccagagaacacataccggagagaaaccctataaatgtcccgagtgcggaaaatccttcagcaccaccggcgctctgacagagcatcagaggacacacaccggcaaaaagacctccgctagcggcagcggcggcggcagcggcggcaaccacgaccaggagttcgacccccccaaggtgtacccccccgtgcccgccgagaagcggaagcccatccgggtgctgagcctgttcgacggcatcgccaccggcctgctggtgctgaaggacctgggcatccaggtggaccggtacatcgccagcgaggtgtgcgaggacagcatcaccgtgggcatggtgcggcaccagggcaagatcatgtacgtgggcgacgtgcggagcgtgacccagaagcacatccaggagtggggccccttcgacctggtgatcggcggcagcccctgcaacgacctgagcatcgtgaaccccgcccggaagggcctgtacgagggcaccggccggctgttcttcgagttctaccggctgctgcacgacgcccggcccaaggagggcgacgaccggcccttcttctggctgttcgagaacgtggtggccatgggcgtgagcgacaagcgggacatcagccggttcctggagagcaaccccgtgatgatcgacgccaaggaggtgagcgccgcccaccgggcccggtacttctggggcaacctgcccggcatgaaccggcccctggccagcaccgtgaacgacaagctggagctgcaggagtgcctggagcacggccggatcgccaagttcagcaaggtgcggaccatcaccacccggagcaacagcatcaagcagggcaaggaccagcacttccccgtgttcatgaacgagaaggaggacatcctgtggtgcaccgagatggagcgggtgttcggcttccccgtgcactacaccgacgtgagcaacatgagccggctggcccggcagcggctgctgggccggagctggagcgtgcccgtgatccggcacctgttcgcccccctgaaggagtacttcgcctgcgtgagcagcggcaacagcaacgccaacagccggggccccagcttcagcagcggcctggtgcccctgagcctgcggggcagccacatgaatcctctggagatgttcgagacagtgcccgtgtggagaaggcaacccgtgagggtgctgagcctcttcgaggacattaagaaggagctgacctctctgggctttctggaatccggcagcgaccccggccagctgaaacacgtggtggacgtgaccgacacagtgaggaaggacgtggaagagtggggcccctttgacctcgtgtatggagccacacctcctctcggccacacatgcgataggcctcccagctggtatctcttccagttccacagactgctccagtacgccagacctaagcccggcagccccagacccttcttctggatgttcgtggacaatctggtgctgaacaaggaggatctggatgtggccagcagatttctggagatggaacccgtgacaatccccgacgtgcatggcggctctctgcagaacgccgtgagagtgtggtccaacatccccgccattagaagcagacactgggctctggtgagcgaggaggaactgtctctgctggcccagaataagcagtcctccaagctggccgccaagtggcccaccaagctggtgaagaactgctttctgcctctgagggagtatttcaagtatttcagcaccgaactgaccagcagcctgagcggcggcaagcggcccgccgccaccaagaaggccggccaggccaagaagaagaagggcagctacccctacgacgtgcccgactacgcctgagcggccgcttaattaagctgccttctgcggggcttgccttctggccatgcccttcttctctcccttgcacctgtacctcttggtctttgaataaagcctgagtaggaagtctagaaaaaaaaaaaaaaaaaaaaaaaaaaaaaaaaaaaaaaaaaaaaaaaaaaaaaaaaaaaaaaaaaaaaaaaaaaaaaaaa

SEQ ID NO: 232 - DNA, 2179 bp, Artificial Sequence
  Description of Artificial Sequence: Synthetic polynucleotide
aggaaataagagagaaaagaagagtaagaagaaatataagagccaccatggcccccaagaagaagcggaaggtgggcatccacggcgtgcccgccgccggcagcagcggatccctggagcccggcgaaaagccttacaagtgtcccgagtgcggaaagagcttcagcagagccgataatctgaccgagcaccaaaggacccacaccggagagaagccttataagtgtcccgaatgcggcaaaagcttttctagaagcgatcatctgaccaaccaccagaggacacacaccggagaaaaaccttacaaatgccccgagtgcggcaaaagcttctcccagagcagcaatctggtgagacaccaaaggacccacaccggcgaaaaaccctataaatgccccgaatgtggcaagagctttagcacatccggcgagctggtgaggcatcaaagaacacataccggcgagaagccctacaagtgccccgagtgtggaaaaagcttcagcacccacctcgatctgatcagacaccagaggacccataccggagagaaaccctacaaatgtcccgagtgcggaaagtcctttagccagctggcccatctgagagctcatcaaaggacacacaccggcgagaagccttacaagtgtcccgagtgcggaaaatccttctcccaactggcccatctgagggcccaccagagaacccacaccggcaaaaagacctccgctagcggcagcggcggcggcagcggcggcgaggagcccgaggagcccgccgatagcggacaatctctggtgcccgtctacatctacagccccgaatatgtgagcatgtgtgattccctcgccaagatccctaagagagccagcatggtgcattctctgatcgaggcctacgctctgcataagcaaatgaggatcgtgaagcccaaggtcgccagcatggaagagatggccacctttcacaccgatgcctacctccaacatctccagaaggtgtcccaagagggcgacgacgaccaccccgactccattgagtacggactgggctatgattgccccgccaccgagggcatctttgactatgccgccgctatcggcggagctaccatcacagccgcccagtgtctgattgatggcatgtgcaaggtcgccatcaactggtccggaggctggcatcatgccaagaaggatgaggcctccggcttctgttatctgaatgacgccgtgctgggcattctgagactgaggaggaaattcgagaggattctgtacgtggatctggatctgcatcacggagatggagtcgaagatgccttcagcttcaccagcaaggtgatgacagtctctctgcacaagttctcccccggcttctttcccggaaccggcgacgtgtccgacgtgggactgggcaagggaaggtactacagcgtgaacgtgcccattcaagacggcatccaagacgagaagtactaccagatctgcgagtccgtgctcaaggaggtctaccaagccttcaatcctaaggctgtcgtgctccaactgggagctgataccattgctggcgatcccatgtgcagcttcaatatgacacccgtcggaatcggcaagtgcctcaagtacatcctccagtggcagctcgccaccctcattctcggaggaggcggatacaatctggctaataccgccagatgctggacctatctgaccggcgtgattctgggcaaaacactgagcagcgaaatccccgaccacgagtttttcaccgcttacggccccgactacgtgctggagatcacccccagctgcagacccgatagaaacgaaccccatagaatccagcaaattctgaactatatcaagggcaacctcaagcacgtcgtgggaggtggcggatcgggaaagcggcccgccgccaccaagaaggccggtcaggccaagaagaagaagggcagctacccctacgacgtgcccgactacgcctgagcggccgcttaattaagctgccttctgcggggcttgccttctggccatgcccttcttctctcccttgcacctgtacctcttggtctttgaataaagcctgagtaggaagtctagaaaaaaaaaaaaaaaaaaaaaaaaaaaaaaaaaaaaaaaaaaaaaaaaaaaaaaaaaaaaaaaaaaaaaaaaaaaaaaaa

SEQ ID NO: 233 - DNA, 3262 bp, Artificial Sequence
  Description of Artificial Sequence: Synthetic polynucleotide
aggaaataagagagaaaagaagagtaagaagaaatataagagccaccatggcccccaagaagaagcggaaggtgggcggcagcggcggcagcggccagaccggcaagaagagcgagaagggccccgtgtgctggcggaagcgggtgaagagcgagtacatgcggctgcggcagctgaagcggttccggcgggccgacgaggtgaagagcatgttcagcagcaaccggcagaagatcctggagcggaccgagatcctgaaccaggagtggaagcagcggcgaatccagcccgtgcacatcctgaccagcgtgagcagcctgcggggcacccgggagtgcagcgtgaccagcgacctggacttccccacccaggtgatccccctaaagaccctgaacgccgtggccagcgtgcccatcatgtacagctggagccccctgcagcagaacttcatggtggaggacgagaccgtgctgcacaacatcccctacatgggcgacgaggtgctggaccaggacggcaccttcatcgaggagctgatcaagaactacgacggcaaggtgcacggcgaccgggagtgcggcttcatcaacgacgagatcttcgtggagctggtgaacgccctgggccagtacaacgacgacgacgacgacgacgacggcgacgaccccgaggagcgggaggagaagcagaaggacctggaggaccaccgggacgacaaggagagccggcccccccggaagttccccagcgacaagatcttcgaggccatcagcagcatgttccccgacaagggcaccgccgaggagctgaaggagaagtacaaggagctgaccgagcagcagctgcccggcgccctgccccccgagtgcacccccaacatcgacggccccaacgccaagagcgtgcagcgggagcagagcctgcacagcttccacaccctgttctgccggcggtgcttcaagtacgactgcttcctgcaccccttccacgccacccccaacacctacaagcggaagaacaccgagaccgccctggacaacaagccctgcggcccccagtgctaccagcacctggagggcgccaaggagttcgccgccgccctgaccgccgagcggatcaagaccccccccaagcggcccggcggccggcggcggggccggctgcccaacaacagcagccggcccagcacccccaccatcaacgtgctggagagcaaggacaccgacagcgaccgggaggccggcaccgagaccggcggcgagaacaacgacaaggaggaggaggagaagaaggacgagaccagcagcagcagcgaggccaacagccggtgccagacccccatcaagatgaagcccaacatcgagccccccgagaacgtggagtggagcggcgccgaggccagcatgttccgggtgctgatcggcacctactacgacaacttctgcgccatcgcccggctgatcggcaccaagacctgccggcaggtgtacgagttccgggtgaaggagagcagcatcatcgcccccgcccccgccgaggacgtggacacccccccccggaagaagaagcggaagcaccggctgtgggccgcccactgccggaagatccagctgaagaaggacggcagcagcaaccacgtgtacaactaccagccctgcgaccacccccggcagccctgcgacagcagctgcccctgcgtgatcgcccagaacttctgcgagaagttctgccagtgcagcagcgagtgccagaaccggttccccggctgccggtgcaaggcccagtgcaacaccaagcagtgcccctgctacctggccgtgcgggagtgcgaccccgacctgtgcctgacctgcggcgccgccgaccactgggacagcaagaacgtgagctgcaagaactgcagcatccagcggggcagcaagaagcacctgctgctggcccccagcgacgtggccggctggggcatcttcatcaaggaccccgtgcagaagaacgagttcatcagcgagtactgcggcgagatcatcagccaggacgaggccgaccggcggggcaaggtgtacgacaagtacatgtgcagcttcctgttcaacctgaacaacgacttcgtggtggacgccacccggaagggcaacaagatccggttcgccaaccacagcgtgaaccccaactgctacgccaaggtgatgatggtgaacggcgaccaccggatcggcatcttcgccaagcgggccatccagaccggcgaggagctgttcttcgactaccggtacagccaggccgacgccctgaagtacgtgggcatcgagcgggagatggagatccccggcagcagcggatccctggagcccggagaaaagccttacaaatgccccgagtgcggcaagtccttcagccagctggctcatctgagagctcatcaaaggacccacaccggcgagaagccctataagtgccccgagtgcggaaaatccttctcccagagcagcaatctcgtcagacaccagaggacccacaccggcgagaaaccttacaagtgtcccgaatgtggaaagtccttctcccaaaagagctctctgatcgcccatcagagaacacataccggcgaaaaaccctacaagtgccccgagtgtggcaaaagcttttccaccaccggcaatctgaccgtgcatcaaagaacccacaccggcgaaaaaccctacaaatgccccgagtgtggcaaatccttctccgaccccggccatctggtgaggcaccagaggacacacaccggcgagaaaccttataaatgtcccgaatgcggcaagtcctttagcaccagcggctctctggtgagacatcagaggacacataccggcgaaaagccttacaagtgtcccgagtgtggcaaaagcttcagccagaacagcacactgacagagcatcagagaacccataccggcaaaaagaccagcgctagcggcagcggcggcggcagcggcggcaagcggcccgccgccaccaagaaggccggccaggccaagaagaagaagggcagctacccctacgacgtgcccgactacgcctgagcggccgcttaattaagctgccttctgcggggcttgccttctggccatgcccttcttctctcccttgcacctgtacctcttggtctttgaataaagcctgagtaggaagtctagaaaaaaaaaaaaaaaaaaaaaaaaaaaaaaaaaaaaaaaaaaaaaaaaaaaaaaaaaaaaaaaaaaaaaaaaaaaaaaaa

SEQ ID NO: 234 - DNA, 3262 bp, Artificial Sequence
  Description of Artificial Sequence: Synthetic polynucleotide
aggaaataagagagaaaagaagagtaagaagaaatataagagccaccatggcccccaagaagaagcggaaggtgggcggcagcggcggcagcggccagaccggcaagaagagcgagaagggccccgtgtgctggcggaagcgggtgaagagcgagtacatgcggctgcggcagctgaagcggttccggcgggccgacgaggtgaagagcatgttcagcagcaaccggcagaagatcctggagcggaccgagatcctgaaccaggagtggaagcagcggcgaatccagcccgtgcacatcctgaccagcgtgagcagcctgcggggcacccgggagtgcagcgtgaccagcgacctggacttccccacccaggtgatccccctaaagaccctgaacgccgtggccagcgtgcccatcatgtacagctggagccccctgcagcagaacttcatggtggaggacgagaccgtgctgcacaacatcccctacatgggcgacgaggtgctggaccaggacggcaccttcatcgaggagctgatcaagaactacgacggcaaggtgcacggcgaccgggagtgcggcttcatcaacgacgagatcttcgtggagctggtgaacgccctgggccagtacaacgacgacgacgacgacgacgacggcgacgaccccgaggagcgggaggagaagcagaaggacctggaggaccaccgggacgacaaggagagccggcccccccggaagttccccagcgacaagatcttcgaggccatcagcagcatgttccccgacaagggcaccgccgaggagctgaaggagaagtacaaggagctgaccgagcagcagctgcccggcgccctgccccccgagtgcacccccaacatcgacggccccaacgccaagagcgtgcagcgggagcagagcctgcacagcttccacaccctgttctgccggcggtgcttcaagtacgactgcttcctgcaccccttccacgccacccccaacacctacaagcggaagaacaccgagaccgccctggacaacaagccctgcggcccccagtgctaccagcacctggagggcgccaaggagttcgccgccgccctgaccgccgagcggatcaagaccccccccaagcggcccggcggccggcggcggggccggctgcccaacaacagcagccggcccagcacccccaccatcaacgtgctggagagcaaggacaccgacagcgaccgggaggccggcaccgagaccggcggcgagaacaacgacaaggaggaggaggagaagaaggacgagaccagcagcagcagcgaggccaacagccggtgccagacccccatcaagatgaagcccaacatcgagccccccgagaacgtggagtggagcggcgccgaggccagcatgttccgggtgctgatcggcacctactacgacaacttctgcgccatcgcccggctgatcggcaccaagacctgccggcaggtgtacgagttccgggtgaaggagagcagcatcatcgcccccgcccccgccgaggacgtggacacccccccccggaagaagaagcggaagcaccggctgtgggccgcccactgccggaagatccagctgaagaaggacggcagcagcaaccacgtgtacaactaccagccctgcgaccacccccggcagccctgcgacagcagctgcccctgcgtgatcgcccagaacttctgcgagaagttctgccagtgcagcagcgagtgccagaaccggttccccggctgccggtgcaaggcccagtgcaacaccaagcagtgcccctgctacctggccgtgcgggagtgcgaccccgacctgtgcctgacctgcggcgccgccgaccactgggacagcaagaacgtgagctgcaagaactgcagcatccagcggggcagcaagaagcacctgctgctggcccccagcgacgtggccggctggggcatcttcatcaaggaccccgtgcagaagaacgagttcatcagcgagtactgcggcgagatcatcagccaggacgaggccgaccggcggggcaaggtgtacgacaagtacatgtgcagcttcctgttcaacctgaacaacgacttcgtggtggacgccacccggaagggcaacaagatccggttcgccaaccacagcgtgaaccccaactgctacgccaaggtgatgatggtgaacggcgaccaccggatcggcatcttcgccaagcgggccatccagaccggcgaggagctgttcttcgactaccggtacagccaggccgacgccctgaagtacgtgggcatcgagcgggagatggagatccccggcagcagcggatccctggagcccggcgaaaaaccctataaatgccccgagtgtggcaagagcttttccgaccccggacatctcgtgaggcatcagagaacacataccggcgagaaaccctacaagtgccccgaatgcggcaaatccttctctagaaaggacaatctgaaaaaccatcaaagaacccataccggcgagaagccctataaatgtcccgagtgtggaaagagcttcagccacaagaacgctctgcagaaccatcagaggacccataccggcgaaaagccttataagtgccccgagtgcggaaaatccttttctagaagggacgagctgaatgtgcaccaaaggacacataccggagagaaaccctacaaatgccccgagtgcggcaagtccttcagcacctccggcaatctggtgaggcaccaaaggacacacaccggcgaaaaaccttacaagtgtcccgagtgcggaaaaagcttttcccagaacagcacactgaccgaacaccaaaggacccacaccggagagaaaccttataaatgtcccgagtgtggaaagtcctttagccagtccggcaatctgacagagcatcaaagaacccacaccggcaaaaagacctccgctagcggcagcggcggcggcagcggcggcaagcggcccgccgccaccaagaaggccggccaggccaagaagaagaagggcagctacccctacgacgtgcccgactacgcctgagcggccgcttaattaagctgccttctgcggggcttgccttctggccatgcccttcttctctcccttgcacctgtacctcttggtctttgaataaagcctgagtaggaagtctagaaaaaaaaaaaaaaaaaaaaaaaaaaaaaaaaaaaaaaaaaaaaaaaaaaaaaaaaaaaaaaaaaaaaaaaaaaaaaaaa

SEQ ID NO: 235 - DNA, 2179 bp, Artificial Sequence
  Description of Artificial Sequence: Synthetic polynucleotide
aggaaataagagagaaaagaagagtaagaagaaatataagagccaccatggcccccaagaagaagcggaaggtgggcatccacggcgtgcccgccgccggcagcagcggatccctggagcccggcgaaaaaccctataaatgccccgagtgtggcaagagcttttccgaccccggacacctcgtgaggcatcagagaacacataccggcgagaaaccctacaagtgccccgaatgcggcaaatccttctctagaaaggacaatctgaaaaaccatcaaagaacccataccggcgagaagccctataaatgtcccgagtgtggaaagagcttcagccacaagaacgctctgcagaaccatcagaggacccataccggcgaaaagccttataagtgccccgagtgcggaaaatccttttctagaagggacgagctgaatgtgcaccaaaggacacataccggagagaaaccctacaaatgccccgagtgcggcaagtccttcagcacctccggcaatctggtgaggcaccaaaggacacacaccggcgaaaaaccttacaagtgtcccgagtgcggaaaaagcttttcccagaacagcacactgaccgaacaccaaaggacccacaccggagagaaaccttataaatgtcccgagtgtggaaagtcctttagccagtccggcaatctgacagagcatcaaagaacccacaccggcaaaaagacctccgctagcggcagcggcggcggcagcggcggcgaggagcccgaggagcccgccgatagcggacaatctctggtgcccgtctacatctacagccccgaatatgtgagcatgtgtgattccctcgccaagatccctaagagagccagcatggtgcattctctgatcgaggcctacgctctgcataagcaaatgaggatcgtgaagcccaaggtcgccagcatggaagagatggccacctttcacaccgatgcctacctccaacatctccagaaggtgtcccaagagggcgacgacgaccaccccgactccattgagtacggactgggctatgattgccccgccaccgagggcatctttgactatgccgccgctatcggcggagctaccatcacagccgcccagtgtctgattgatggcatgtgcaaggtcgccatcaactggtccggaggctggcatcatgccaagaaggatgaggcctccggcttctgttatctgaatgacgccgtgctgggcattctgagactgaggaggaaattcgagaggattctgtacgtggatctggatctgcatcacggagatggagtcgaagatgccttcagcttcaccagcaaggtgatgacagtctctctgcacaagttctcccccggcttctttcccggaaccggcgacgtgtccgacgtgggactgggcaagggaaggtactacagcgtgaacgtgcccattcaagacggcatccaagacgagaagtactaccagatctgcgagtccgtgctcaaggaggtctaccaagccttcaatcctaaggctgtcgtgctccaactgggagctgataccattgctggcgatcccatgtgcagcttcaatatgacacccgtcggaatcggcaagtgcctcaagtacatcctccagtggcagctcgccaccctcattctcggaggaggcggatacaatctggctaataccgccagatgctggacctatctgaccggcgtgattctgggcaaaacactgagcagcgaaatccccgaccacgagtttttcaccgcttacggccccgactacgtgctggagatcacccccagctgcagacccgatagaaacgaaccccatagaatccagcaaattctgaactatatcaagggcaacctcaagcacgtcgtgggaggtggcggatcgggaaagcggcccgccgccaccaagaaggccggtcaggccaagaagaagaagggcagctacccctacgacgtgcccgactacgcctgagcggccgcttaattaagctgccttctgcggggcttgccttctggccatgcccttcttctctcccttgcacctgtacctcttggtctttgaataaagcctgagtaggaagtctagaaaaaaaaaaaaaaaaaaaaaaaaaaaaaaaaaaaaaaaaaaaaaaaaaaaaaaaaaaaaaaaaaaaaaaaaaaaaaaaa

SEQ ID NO: 236 - DNA, 2668 bp, Artificial Sequence
  Description of Artificial Sequence: Synthetic polynucleotide
aggaaataagagagaaaagaagagtaagaagaaatataagagccaccatggcccccaagaagaagcggaaggtgggcatccacggcgtgcccgccgccggcagcagcggatccctggagcccggcgaaaagccttacaagtgtcccgagtgcggaaagagcttcagcagagccgataatctgaccgagcaccaaaggacccacaccggagagaagccttataagtgtcccgaatgcggcaaaagcttttctagaagcgatcatctgaccaaccaccagaggacacacaccggagaaaaaccttacaaatgccccgagtgcggcaaaagcttctcccagagcagcaatctggtgagacaccaaaggacccacaccggcgaaaaaccctataaatgccccgaatgtggcaagagctttagcacatccggcgagctggtgaggcatcaaagaacacataccggcgagaagccctacaagtgccccgagtgtggaaaaagcttcagcacccacctcgatctgatcagacaccagaggacccataccggagagaaaccctacaaatgtcccgagtgcggaaagtcctttagccagctggcccatctgagagctcatcaaaggacacacaccggcgagaagccttacaagtgtcccgagtgcggaaaatccttctcccaactggcccatctgagggcccaccagagaacccacaccggcaaaaagacctccgctagcggcagcggcggcggcagcggcggcaaccacgaccaggagttcgacccccccaaggtgtacccccccgtgcccgccgagaagcggaagcccatccgggtgctgagcctgttcgacggcatcgccaccggcctgctggtgctgaaggacctgggcatccaggtggaccggtacatcgccagcgaggtgtgcgaggacagcatcaccgtgggcatggtgcggcaccagggcaagatcatgtacgtgggcgacgtgcggagcgtgacccagaagcacatccaggagtggggccccttcgacctggtgatcggcggcagcccctgcaacgacctgagcatcgtgaaccccgcccggaagggcctgtacgagggcaccggccggctgttcttcgagttctaccggctgctgcacgacgcccggcccaaggagggcgacgaccggcccttcttctggctgttcgagaacgtggtggccatgggcgtgagcgacaagcgggacatcagccggttcctggagagcaaccccgtgatgatcgacgccaaggaggtgagcgccgcccaccgggcccggtacttctggggcaacctgcccggcatgaaccggcccctggccagcaccgtgaacgacaagctggagctgcaggagtgcctggagcacggccggatcgccaagttcagcaaggtgcggaccatcaccacccggagcaacagcatcaagcagggcaaggaccagcacttccccgtgttcatgaacgagaaggaggacatcctgtggtgcaccgagatggagcgggtgttcggcttccccgtgcactacaccgacgtgagcaacatgagccggctggcccggcagcggctgctgggccggagctggagcgtgcccgtgatccggcacctgttcgcccccctgaaggagtacttcgcctgcgtgagcagcggcaacagcaacgccaacagccggggccccagcttcagcagcggcctggtgcccctgagcctgcggggcagccacatgaatcctctggagatgttcgagacagtgcccgtgtggagaaggcaacccgtgagggtgctgagcctcttcgaggacattaagaaggagctgacctctctgggctttctggaatccggcagcgaccccggccagctgaaacacgtggtggacgtgaccgacacagtgaggaaggacgtggaagagtggggcccctttgacctcgtgtatggagccacacctcctctcggccacacatgcgataggcctcccagctggtatctcttccagttccacagactgctccagtacgccagacctaagcccggcagccccagacccttcttctggatgttcgtggacaatctggtgctgaacaaggaggatctggatgtggccagcagatttctggagatggaacccgtgacaatccccgacgtgcatggcggctctctgcagaacgccgtgagagtgtggtccaacatccccgccattagaagcagacactgggctctggtgagcgaggaggaactgtctctgctggcccagaataagcagtcctccaagctggccgccaagtggcccaccaagctggtgaagaactgctttctgcctctgagggagtatttcaagtatttcagcaccgaactgaccagcagcctgagcggcggcaagcggcccgccgccaccaagaaggccggccaggccaagaagaagaagggcagctacccctacgacgtgcccgactacgcctgagcggccgcttaattaagctgccttctgcggggcttgccttctggccatgcccttcttctctcccttgcacctgtacctcttggtctttgaataaagcctgagtaggaagtctagaaaaaaaaaaaaaaaaaaaaaaaaaaaaaaaaaaaaaaaaaaaaaaaaaaaaaaaaaaaaaaaaaaaaaaaaaaaaaaaa

SEQ ID NO: 237 - DNA, 2668 bp, Artificial Sequence
  Description of Artificial Sequence: Synthetic polynucleotide
aggaaataagagagaaaagaagagtaagaagaaatataagagccaccatggcccccaagaagaagcggaaggtgggcatccacggcgtgcccgccgccggcagcagcggatccctggagcccggagaaaagccttacaaatgccccgagtgcggcaagtccttcagccagctggctcatctgagagctcatcaaaggacccacaccggcgagaagccctataagtgccccgagtgcggaaaatccttctcccagagcagcaatctcgtcagacaccagaggacccacaccggcgagaaaccttacaagtgtcccgaatgtggaaagtccttctcccaaaagagctctctgatcgcccatcagagaacacataccggcgaaaaaccctacaagtgccccgagtgtggcaaaagcttttccaccaccggcaatctgaccgtgcatcaaagaacccacaccggcgaaaaaccctacaaatgccccgagtgtggcaaatccttctccgaccccggccatctggtgaggcaccagaggacacacaccggcgagaaaccttataaatgtcccgaatgcggcaagtcctttagcaccagcggctctctggtgagacatcagaggacacataccggcgaaaagccttacaagtgtcccgagtgtggcaaaagcttcagccagaacagcacactgacagagcatcagagaacccataccggcaaaaagaccagcgctagcggcagcggcggcggcagcggcggcaaccacgaccaggagttcgacccccccaaggtgtacccccccgtgcccgccgagaagcggaagcccatccgggtgctgagcctgttcgacggcatcgccaccggcctgctggtgctgaaggacctgggcatccaggtggaccggtacatcgccagcgaggtgtgcgaggacagcatcaccgtgggcatggtgcggcaccagggcaagatcatgtacgtgggcgacgtgcggagcgtgacccagaagcacatccaggagtggggccccttcgacctggtgatcggcggcagcccctgcaacgacctgagcatcgtgaaccccgcccggaagggcctgtacgagggcaccggccggctgttcttcgagttctaccggctgctgcacgacgcccggcccaaggagggcgacgaccggcccttcttctggctgttcgagaacgtggtggccatgggcgtgagcgacaagcgggacatcagccggttcctggagagcaaccccgtgatgatcgacgccaaggaggtgagcgccgcccaccgggcccggtacttctggggcaacctgcccggcatgaaccggcccctggccagcaccgtgaacgacaagctggagctgcaggagtgcctggagcacggccggatcgccaagttcagcaaggtgcggaccatcaccacccggagcaacagcatcaagcagggcaaggaccagcacttccccgtgttcatgaacgagaaggaggacatcctgtggtgcaccgagatggagcgggtgttcggcttccccgtgcactacaccgacgtgagcaacatgagccggctggcccggcagcggctgctgggccggagctggagcgtgcccgtgatccggcacctgttcgcccccctgaaggagtacttcgcctgcgtgagcagcggcaacagcaacgccaacagccggggccccagcttcagcagcggcctggtgcccctgagcctgcggggcagccacatgaatcctctggagatgttcgagacagtgcccgtgtggagaaggcaacccgtgagggtgctgagcctcttcgaggacattaagaaggagctgacctctctgggctttctggaatccggcagcgaccccggccagctgaaacacgtggtggacgtgaccgacacagtgaggaaggacgtggaagagtggggcccctttgacctcgtgtatggagccacacctcctctcggccacacatgcgataggcctcccagctggtatctcttccagttccacagactgctccagtacgccagacctaagcccggcagccccagacccttcttctggatgttcgtggacaatctggtgctgaacaaggaggatctggatgtggccagcagatttctggagatggaacccgtgacaatccccgacgtgcatggcggctctctgcagaacgccgtgagagtgtggtccaacatccccgccattagaagcagacactgggctctggtgagcgaggaggaactgtctctgctggcccagaataagcagtcctccaagctggccgccaagtggcccaccaagctggtgaagaactgctttctgcctctgagggagtatttcaagtatttcagcaccgaactgaccagcagcctgagcggcggcaagcggcccgccgccaccaagaaggccggccaggccaagaagaagaagggcagctacccctacgacgtgcccgactacgcctgagcggccgcttaattaagctgccttctgcggggcttgccttctggccatgcccttcttctctcccttgcacctgtacctcttggtctttgaataaagcctgagtaggaagtctagaaaaaaaaaaaaaaaaaaaaaaaaaaaaaaaaaaaaaaaaaaaaaaaaaaaaaaaaaaaaaaaaaaaaaaaaaaaaaaaa

SEQ ID NO: 238 - DNA, 2668 bp, Artificial Sequence
  Description of Artificial Sequence: Synthetic polynucleotide
aggaaataagagagaaaagaagagtaagaagaaatataagagccaccatggcccccaagaagaagcggaaggtgggcatccacggcgtgcccgccgccggcagcagcggatccctggagcccggcgaaaaaccctataaatgccccgagtgtggcaagagcttttccgaccccggacacctcgtgaggcatcagagaacacataccggcgagaaaccctacaagtgccccgaatgcggcaaatccttctctagaaaggacaatctgaaaaaccatcaaagaacccataccggcgagaagccctataaatgtcccgagtgtggaaagagcttcagccacaagaacgctctgcagaaccatcagaggacccataccggcgaaaagccttataagtgccccgagtgcggaaaatccttttctagaagggacgagctgaatgtgcaccaaaggacacataccggagagaaaccctacaaatgccccgagtgcggcaagtccttcagcacctccggcaatctggtgaggcaccaaaggacacacaccggcgaaaaaccttacaagtgtcccgagtgcggaaaaagcttttcccagaacagcacactgaccgaacaccaaaggacccacaccggagagaaaccttataaatgtcccgagtgtggaaagtcctttagccagtccggcaatctgacagagcatcaaagaacccacaccggcaaaaagacctccgctagcggcagcggcggcggcagcggcggcaaccacgaccaggagttcgacccccccaaggtgtacccccccgtgcccgccgagaagcggaagcccatccgggtgctgagcctgttcgacggcatcgccaccggcctgctggtgctgaaggacctgggcatccaggtggaccggtacatcgccagcgaggtgtgcgaggacagcatcaccgtgggcatggtgcggcaccagggcaagatcatgtacgtgggcgacgtgcggagcgtgacccagaagcacatccaggagtggggccccttcgacctggtgatcggcggcagcccctgcaacgacctgagcatcgtgaaccccgcccggaagggcctgtacgagggcaccggccggctgttcttcgagttctaccggctgctgcacgacgcccggcccaaggagggcgacgaccggcccttcttctggctgttcgagaacgtggtggccatgggcgtgagcgacaagcgggacatcagccggttcctggagagcaaccccgtgatgatcgacgccaaggaggtgagcgccgcccaccgggcccggtacttctggggcaacctgcccggcatgaaccggcccctggccagcaccgtgaacgacaagctggagctgcaggagtgcctggagcacggccggatcgccaagttcagcaaggtgcggaccatcaccacccggagcaacagcatcaagcagggcaaggaccagcacttccccgtgttcatgaacgagaaggaggacatcctgtggtgcaccgagatggagcgggtgttcggcttccccgtgcactacaccgacgtgagcaacatgagccggctggcccggcagcggctgctgggccggagctggagcgtgcccgtgatccggcacctgttcgcccccctgaaggagtacttcgcctgcgtgagcagcggcaacagcaacgccaacagccggggccccagcttcagcagcggcctggtgcccctgagcctgcggggcagccacatgaatcctctggagatgttcgagacagtgcccgtgtggagaaggcaacccgtgagggtgctgagcctcttcgaggacattaagaaggagctgacctctctgggctttctggaatccggcagcgaccccggccagctgaaacacgtggtggacgtgaccgacacagtgaggaaggacgtggaagagtggggcccctttgacctcgtgtatggagccacacctcctctcggccacacatgcgataggcctcccagctggtatctcttccagttccacagactgctccagtacgccagacctaagcccggcagccccagacccttcttctggatgttcgtggacaatctggtgctgaacaaggaggatctggatgtggccagcagatttctggagatggaacccgtgacaatccccgacgtgcatggcggctctctgcagaacgccgtgagagtgtggtccaacatccccgccattagaagcagacactgggctctggtgagcgaggaggaactgtctctgctggcccagaataagcagtcctccaagctggccgccaagtggcccaccaagctggtgaagaactgctttctgcctctgagggagtatttcaagtatttcagcaccgaactgaccagcagcctgagcggcggcaagcggcccgccgccaccaagaaggccggccaggccaagaagaagaagggcagctacccctacgacgtgcccgactacgcctgagcggccgcttaattaagctgccttctgcggggcttgccttctggccatgcccttcttctctcccttgcacctgtacctcttggtctttgaataaagcctgagtaggaagtctagaaaaaaaaaaaaaaaaaaaaaaaaaaaaaaaaaaaaaaaaaaaaaaaaaaaaaaaaaaaaaaaaaaaaaaaaaaaaaaaa

SEQ ID NO: 239 - DNA, 2668 bp, Artificial Sequence
  Description of Artificial Sequence: Synthetic polynucleotide
aggaaataagagagaaaagaagagtaagaagaaatataagagccaccatggcccccaagaagaagcggaaggtgggcatccacggcgtgcccgccgccggcagcagcggatccctggagcccggcgaaaagccttacaaatgtcccgaatgcggaaagagcttcagcagagccgacaatctgaccgaacatcagagaacccataccggagaaaaaccttacaaatgtcccgagtgcggcaaaagcttctcccaagccggacatctggccagccaccaaaggacacataccggcgagaaaccctacaagtgccccgagtgcggcaagtccttctctagatccgatgagctggtcagacatcagagaacccataccggcgagaagccttataagtgccccgaatgtggcaagtccttcagccagagagctcatctggagaggcatcaaagaacacacaccggagagaaaccttacaagtgtcccgagtgtggaaagagcttctccagaagggacgagctgaacgtccaccaaagaacccataccggcgaaaagccctataaatgccccgagtgtggaaaatccttttctagatccgaccatctgacaacccaccagaggacccataccggagagaagccctacaaatgccccgagtgtggaaaaagcttctctagaaacgatgctctgacagagcaccaaaggacccacaccggcaaaaagaccagcgctagcggcagcggcggcggcagcggcggcaaccacgaccaggagttcgacccccccaaggtgtacccccccgtgcccgccgagaagcggaagcccatccgggtgctgagcctgttcgacggcatcgccaccggcctgctggtgctgaaggacctgggcatccaggtggaccggtacatcgccagcgaggtgtgcgaggacagcatcaccgtgggcatggtgcggcaccagggcaagatcatgtacgtgggcgacgtgcggagcgtgacccagaagcacatccaggagtggggccccttcgacctggtgatcggcggcagcccctgcaacgacctgagcatcgtgaaccccgcccggaagggcctgtacgagggcaccggccggctgttcttcgagttctaccggctgctgcacgacgcccggcccaaggagggcgacgaccggcccttcttctggctgttcgagaacgtggtggccatgggcgtgagcgacaagcgggacatcagccggttcctggagagcaaccccgtgatgatcgacgccaaggaggtgagcgccgcccaccgggcccggtacttctggggcaacctgcccggcatgaaccggcccctggccagcaccgtgaacgacaagctggagctgcaggagtgcctggagcacggccggatcgccaagttcagcaaggtgcggaccatcaccacccggagcaacagcatcaagcagggcaaggaccagcacttccccgtgttcatgaacgagaaggaggacatcctgtggtgcaccgagatggagcgggtgttcggcttccccgtgcactacaccgacgtgagcaacatgagccggctggcccggcagcggctgctgggccggagctggagcgtgcccgtgatccggcacctgttcgcccccctgaaggagtacttcgcctgcgtgagcagcggcaacagcaacgccaacagccggggccccagcttcagcagcggcctggtgcccctgagcctgcggggcagccacatgaatcctctggagatgttcgagacagtgcccgtgtggagaaggcaacccgtgagggtgctgagcctcttcgaggacattaagaaggagctgacctctctgggctttctggaatccggcagcgaccccggccagctgaaacacgtggtggacgtgaccgacacagtgaggaaggacgtggaagagtggggcccctttgacctcgtgtatggagccacacctcctctcggccacacatgcgataggcctcccagctggtatctcttccagttccacagactgctccagtacgccagacctaagcccggcagccccagacccttcttctggatgttcgtggacaatctggtgctgaacaaggaggatctggatgtggccagcagatttctggagatggaacccgtgacaatccccgacgtgcatggcggctctctgcagaacgccgtgagagtgtggtccaacatccccgccattagaagcagacactgggctctggtgagcgaggaggaactgtctctgctggcccagaataagcagtcctccaagctggccgccaagtggcccaccaagctggtgaagaactgctttctgcctctgagggagtatttcaagtatttcagcaccgaactgaccagcagcctgagcggcggcaagcggcccgccgccaccaagaaggccggccaggccaagaagaagaagggcagctacccctacgacgtgcccgactacgcctgagcggccgcttaattaagctgccttctgcggggcttgccttctggccatgcccttcttctctcccttgcacctgtacctcttggtctttgaataaagcctgagtaggaagtctagaaaaaaaaaaaaaaaaaaaaaaaaaaaaaaaaaaaaaaaaaaaaaaaaaaaaaaaaaaaaaaaaaaaaaaaaaaaaaaaa

SEQ ID NO: 240 - DNA, 2179 bp, Artificial Sequence
  Description of Artificial Sequence: Synthetic polynucleotide
aggaaataagagagaaaagaagagtaagaagaaatataagagccaccatggcccccaagaagaagcggaaggtgggcatccacggcgtgcccgccgccggcagcagcggatccctggagcccggcgaaaagccttacaagtgccccgagtgtggcaaatcctttagcaccaccggaaatctgaccgtccaccagagaacacataccggcgagaaaccctacaagtgtcccgagtgcggcaaatccttcagccagctggcccatctgagagcccatcaaaggacccataccggcgagaaaccttacaagtgtcccgaatgtggaaagtcctttagcagccccgccgatctgacaagacatcaaagaacccacaccggcgagaagccctataaatgtcccgagtgtggaaagtccttcagccagagcggcaatctgaccgagcatcaaagaacccataccggcgaaaagccctataagtgccccgaatgcggaaaaagcttctccacaagcggcgagctggtgagacaccaaaggacacataccggcgaaaagccttataaatgccccgagtgcggcaagagcttctctagaaaggacaatctgaagaaccaccaaagaacacacaccggcgagaagccctacaaatgccccgagtgcggcaagagctttagccagtccagcaacctcgtgagacatcagaggacacataccggaaaaaagaccagcgctagcggcagcggcggcggcagcggcggcgaggagcccgaggagcccgccgatagcggacaatctctggtgcccgtctacatctacagccccgaatatgtgagcatgtgtgattccctcgccaagatccctaagagagccagcatggtgcattctctgatcgaggcctacgctctgcataagcaaatgaggatcgtgaagcccaaggtcgccagcatggaagagatggccacctttcacaccgatgcctacctccaacatctccagaaggtgtcccaagagggcgacgacgaccaccccgactccattgagtacggactgggctatgattgccccgccaccgagggcatctttgactatgccgccgctatcggcggagctaccatcacagccgcccagtgtctgattgatggcatgtgcaaggtcgccatcaactggtccggaggctggcatcatgccaagaaggatgaggcctccggcttctgttatctgaatgacgccgtgctgggcattctgagactgaggaggaaattcgagaggattctgtacgtggatctggatctgcatcacggagatggagtcgaagatgccttcagcttcaccagcaaggtgatgacagtctctctgcacaagttctcccccggcttctttcccggaaccggcgacgtgtccgacgtgggactgggcaagggaaggtactacagcgtgaacgtgcccattcaagacggcatccaagacgagaagtactaccagatctgcgagtccgtgctcaaggaggtctaccaagccttcaatcctaaggctgtcgtgctccaactgggagctgataccattgctggcgatcccatgtgcagcttcaatatgacacccgtcggaatcggcaagtgcctcaagtacatcctccagtggcagctcgccaccctcattctcggaggaggcggatacaatctggctaataccgccagatgctggacctatctgaccggcgtgattctgggcaaaacactgagcagcgaaatccccgaccacgagtttttcaccgcttacggccccgactacgtgctggagatcacccccagctgcagacccgatagaaacgaaccccatagaatccagcaaattctgaactatatcaagggcaacctcaagcacgtcgtgggaggtggcggatcgggaaagcggcccgccgccaccaagaaggccggtcaggccaagaagaagaagggcagctacccctacgacgtgcccgactacgcctgagcggccgcttaattaagctgccttctgcggggcttgccttctggccatgcccttcttctctcccttgcacctgtacctcttggtctttgaataaagcctgagtaggaagtctagaaaaaaaaaaaaaaaaaaaaaaaaaaaaaaaaaaaaaaaaaaaaaaaaaaaaaaaaaaaaaaaaaaaaaaaaaaaaaaaa

SEQ ID NO: 241 - DNA, 2179 bp, Artificial Sequence
  Description of Artificial Sequence: Synthetic polynucleotide
aggaaataagagagaaaagaagagtaagaagaaatataagagccaccatggcccccaagaagaagcggaaggtgggcatccacggcgtgcccgccgccggcagcagcggatccctggagcccggcgaaaaaccctataagtgccccgagtgcggcaagagctttagcgatcccggccatctggtgaggcatcagaggacccacaccggcgaaaagccttacaaatgccccgagtgtggaaaaagcttcagcagaagcgatcatctgaccacccatcagaggacacataccggcgagaagccttataaatgccccgaatgtggaaagagcttctccagaagcgaccatctgaccaaccaccagaggacccataccggagaaaaaccttacaaatgccccgagtgtggaaagtccttcagctcccccgccgatctgacaagacatcagagaacccacaccggcgaaaaaccttataaatgtcccgagtgtggcaaaagcttctccgacaagaaggatctgacaagacaccaaaggacccacaccggcgagaaaccttataaatgtcccgaatgcggaaaaagctttagcagaaacgacgctctgaccgaacaccagagaacacataccggagagaaaccctataaatgtcccgagtgcggaaaatccttcagcaccaccggcgctctgacagagcatcagaggacacacaccggcaaaaagacctccgctagcggcagcggcggcggcagcggcggcgaggagcccgaggagcccgccgatagcggacaatctctggtgcccgtctacatctacagccccgaatatgtgagcatgtgtgattccctcgccaagatccctaagagagccagcatggtgcattctctgatcgaggcctacgctctgcataagcaaatgaggatcgtgaagcccaaggtcgccagcatggaagagatggccacctttcacaccgatgcctacctccaacatctccagaaggtgtcccaagagggcgacgacgaccaccccgactccattgagtacggactgggctatgattgccccgccaccgagggcatctttgactatgccgccgctatcggcggagctaccatcacagccgcccagtgtctgattgatggcatgtgcaaggtcgccatcaactggtccggaggctggcatcatgccaagaaggatgaggcctccggcttctgttatctgaatgacgccgtgctgggcattctgagactgaggaggaaattcgagaggattctgtacgtggatctggatctgcatcacggagatggagtcgaagatgccttcagcttcaccagcaaggtgatgacagtctctctgcacaagttctcccccggcttctttcccggaaccggcgacgtgtccgacgtgggactgggcaagggaaggtactacagcgtgaacgtgcccattcaagacggcatccaagacgagaagtactaccagatctgcgagtccgtgctcaaggaggtctaccaagccttcaatcctaaggctgtcgtgctccaactgggagctgataccattgctggcgatcccatgtgcagcttcaatatgacacccgtcggaatcggcaagtgcctcaagtacatcctccagtggcagctcgccaccctcattctcggaggaggcggatacaatctggctaataccgccagatgctggacctatctgaccggcgtgattctgggcaaaacactgagcagcgaaatccccgaccacgagtttttcaccgcttacggccccgactacgtgctggagatcacccccagctgcagacccgatagaaacgaaccccatagaatccagcaaattctgaactatatcaagggcaacctcaagcacgtcgtgggaggtggcggatcgggaaagcggcccgccgccaccaagaaggccggtcaggccaagaagaagaagggcagctacccctacgacgtgcccgactacgcctgagcggccgcttaattaagctgccttctgcggggcttgccttctggccatgcccttcttctctcccttgcacctgtacctcttggtctttgaataaagcctgagtaggaagtctagaaaaaaaaaaaaaaaaaaaaaaaaaaaaaaaaaaaaaaaaaaaaaaaaaaaaaaaaaaaaaaaaaaaaaaaaaaaaaaaa

SEQ ID NO: 242 - DNA, 2179 bp, Artificial Sequence
  Description of Artificial Sequence: Synthetic polynucleotide
aggaaataagagagaaaagaagagtaagaagaaatataagagccaccatggcccccaagaagaagcggaaggtgggcatccacggcgtgcccgccgccggcagcagcggatccctggagcccggcgaaaagccttacaaatgtcccgaatgcggaaagagcttcagcagagccgacaatctgaccgaacatcagagaacccataccggagaaaaaccttacaaatgtcccgagtgcggcaaaagcttctcccaagccggacatctggccagccaccaaaggacacataccggcgagaaaccctacaagtgccccgagtgcggcaagtccttctctagatccgatgagctggtcagacatcagagaacccataccggcgagaagccttataagtgccccgaatgtggcaagtccttcagccagagagctcatctggagaggcatcaaagaacacacaccggagagaaaccttacaagtgtcccgagtgtggaaagagcttctccagaagggacgagctgaacgtccaccaaagaacccataccggcgaaaagccctataaatgccccgagtgtggaaaatccttttctagatccgaccatctgacaacccaccagaggacccataccggagagaagccctacaaatgccccgagtgtggaaaaagcttctctagaaacgatgctctgacagagcaccaaaggacccacaccggcaaaaagaccagcgctagcggcagcggcggcggcagcggcggcgaggagcccgaggagcccgccgatagcggacaatctctggtgcccgtctacatctacagccccgaatatgtgagcatgtgtgattccctcgccaagatccctaagagagccagcatggtgcattctctgatcgaggcctacgctctgcataagcaaatgaggatcgtgaagcccaaggtcgccagcatggaagagatggccacctttcacaccgatgcctacctccaacatctccagaaggtgtcccaagagggcgacgacgaccaccccgactccattgagtacggactgggctatgattgccccgccaccgagggcatctttgactatgccgccgctatcggcggagctaccatcacagccgcccagtgtctgattgatggcatgtgcaaggtcgccatcaactggtccggaggctggcatcatgccaagaaggatgaggcctccggcttctgttatctgaatgacgccgtgctgggcattctgagactgaggaggaaattcgagaggattctgtacgtggatctggatctgcatcacggagatggagtcgaagatgccttcagcttcaccagcaaggtgatgacagtctctctgcacaagttctcccccggcttctttcccggaaccggcgacgtgtccgacgtgggactgggcaagggaaggtactacagcgtgaacgtgcccattcaagacggcatccaagacgagaagtactaccagatctgcgagtccgtgctcaaggaggtctaccaagccttcaatcctaaggctgtcgtgctccaactgggagctgataccattgctggcgatcccatgtgcagcttcaatatgacacccgtcggaatcggcaagtgcctcaagtacatcctccagtggcagctcgccaccctcattctcggaggaggcggatacaatctggctaataccgccagatgctggacctatctgaccggcgtgattctgggcaaaacactgagcagcgaaatccccgaccacgagtttttcaccgcttacggccccgactacgtgctggagatcacccccagctgcagacccgatagaaacgaaccccatagaatccagcaaattctgaactatatcaagggcaacctcaagcacgtcgtgggaggtggcggatcgggaaagcggcccgccgccaccaagaaggccggtcaggccaagaagaagaagggcagctacccctacgacgtgcccgactacgcctgagcggccgcttaattaagctgccttctgcggggcttgccttctggccatgcccttcttctctcccttgcacctgtacctcttggtctttgaataaagcctgagtaggaagtctagaaaaaaaaaaaaaaaaaaaaaaaaaaaaaaaaaaaaaaaaaaaaaaaaaaaaaaaaaaaaaaaaaaaaaaaaaaaaaaaa

SEQ ID NO: 243 - protein, 5 aa, Unknown
  Description of Unknown: Thrombin-sensitive sequence
CPRSC

SEQ ID NO: 244 - DNA, 51 bp, Unknown
  Description of Unknown: Anchor sequence
tggatgggagtgtgacagtgctgccttctgaccacaaggtggggcttatac

SEQ ID NO: 245 - DNA, 51 bp, Unknown
  Description of Unknown: Anchor sequence
gtataagccccaccttgtggtcagaaggcagcactgtcacactcccatcca

SEQ ID NO: 246 - DNA, 102 bp, Unknown
  Description of Unknown: Anchor sequence
ttgttttcggctctagatggcgccataagcctatgtttaccttgacttttgcaaatggccatggcactgcctgtcccataaggaggaggaccaaagggatta

SEQ ID NO: 247 - DNA, 51 bp, Unknown
  Description of Unknown: Anchor sequence
caaaagtcaaggtaaacataggcttatggcgccatctagagccgaaaacaa

We claim:

1. A method of decreasing expression of a first gene and a second gene in a cell, comprising:
contacting the cell with a site-specific disrupting agent that comprises a targeting moiety that binds specifically to a first anchor sequence or a site proximal to a first anchor sequence, in an amount sufficient to decrease expression of the first and second genes,
the first and second genes being within an anchor sequence-mediated conjunction that comprises the first anchor sequence and a second anchor sequence,
wherein optionally the first gene and the second gene are proinflammatory genes;
thereby decreasing expression of the first and second genes.

2. A site-specific disrupting agent, comprising:
a DNA-binding, e.g., a targeting moiety that binds specifically to or proximal to a first anchor sequence within a cell,
wherein the first anchor sequence is part of an anchor sequence-mediated conjunction that further comprises a second anchor sequence, a first gene, and a second gene,
wherein optionally the first gene and the second gene are proinflammatory genes.

3. The site-specific disrupting agent of claim 2, wherein the first or second anchor sequence is located between IL-8 and RASSF6; between the IL-8 enhancer and RASSF6; between CXCL1 and CXCL4; between CXCL2 and EPGN; or between the E2 enhancer and EPGN.

4. The site-specific disrupting agent of claim 2 or 3, wherein the site-specific disrupting agent further comprises an effector moiety.

5. The site-specific disrupting agent of any of claims 2-4 wherein the targeting moiety comprises a TAL effector molecule, a CRISPR/Cas molecule (e.g., a catalytically inactive CRISPR/Cas protein), a zinc finger domain, a tetR domain, a meganuclease, or an oligonucleotide.

6. The site-specific disrupting agent of any of claims 2-5, wherein the effector moiety comprises an effector described herein, e.g., MQ1, DNMT1, DNMT3A1, DNMT3A2, DNMT3B1, DNMT3B2, DNMT3B3, DNMT3B4, DNMT3B5, DNMT3B6, DNMT3L, EZH2, HDAC8, KRAB, MeCP2, HP1, RBBP4, REST, FOG1, SUZ12, SETDB1, SETDB2, EHMT2 (i.e., G9A), EHMT1 (i.e., GLP), SUV39H1, HDAC1, HDAC2, HDAC3, HDAC4, HDAC5, HDAC6, HDAC7, HDAC8, HDAC9, HDAC10, HDAC11, SIRT1, SIRT2, SIRT3, SIRT4, SIRT5, SIRT6, SIRT7, SIRT8, SIRT9, EZH1, SUV39H2, SETD8, SUV420H1, SUV420H2 or DNMT3, or a functional variant or fragment of any thereof.

7. The site-specific disrupting agent of any of claims 2-6, wherein the effector moiety is linked to the targeting moiety via a linker.

8. The site-specific disrupting agent of any of claims 2-7, wherein the effector moiety is C-terminal of the targeting moiety.

9. The site-specific disrupting agent of any of claims 2-7, wherein the effector moiety is N-terminal of the targeting moiety.

10. The site-specific disrupting agent of any of claims 2-9, wherein the effector moiety is encoded by a nucleotide sequence chosen from any of SEQ ID NOs: 10, 14, 16, 18, 66, 68, or a sequence with at least 80, 85, 90, 95, 99, or 100% identity thereto, or having no more than 20, 19, 18, 17, 16, 15, 14, 13, 12, 11, 10, 9, 8, 7, 6, 5, 4, 3, 2, or 1 positions of difference thereto.

11. The site-specific disrupting agent of any of claims 2-10, wherein the effector moiety comprises an amino acid sequence according to any of SEQ ID NOs: 11, 12, 13, 15, 17, 19, 67 or a sequence with at least 80, 85, 90, 95, 99, or 100% identity thereto, or having no more than 20, 19, 18, 17, 16, 15, 14, 13, 12, 11, 10, 9, 8, 7, 6, 5, 4, 3, 2, or 1 positions of difference thereto.

12. The site-specific disrupting agent of any of claims 2-11, wherein the effector moiety is MQ1 or a functional variant or fragment thereof, e.g., wherein the effector moiety comprises an amino acid sequence of SEQ ID NO: 11 or 12 or a sequence with at least 80, 85, 90, 95, 99, or 100% identity thereto, or having no more than 20, 19, 18, 17, 16, 15, 14, 13, 12, 11, 10, 9, 8, 7, 6, 5, 4, 3, 2, or 1 positions of difference thereto, wherein optionally the effector moiety is C-terminal of the targeting moiety.

13. The site-specific disrupting agent of any of claims 2-11, wherein the effector moiety is KRAB, or a functional variant or fragment thereof, e.g., wherein the effector moiety comprises an amino acid sequence of SEQ ID NO: 13 or a sequence with at least 80, 85, 90, 95, 99, or 100% identity thereto, or having no more than 20, 19, 18, 17, 16, 15, 14, 13, 12, 11, 10, 9, 8, 7, 6, 5, 4, 3, 2, or 1 positions of difference thereto, wherein optionally the effector moiety is C-terminal of the targeting moiety.

14. The site-specific disrupting agent of any of claims 2-11, wherein the effector moiety is DNMT3a/3L, or a functional variant or fragment thereof, e.g., wherein the effector moiety comprises an amino acid sequence of SEQ ID NO: 15 or a sequence with at least 80, 85, 90, 95, 99, or 100% identity thereto, or having no more than 20, 19, 18, 17, 16, 15, 14, 13, 12, 11, 10, 9, 8, 7, 6, 5, 4, 3, 2, or 1 positions of difference thereto, wherein optionally the effector moiety is C-terminal of the targeting moiety.

15. The site-specific disrupting agent of any of claims 2-11, wherein the effector moiety is EZH2, or a functional variant or fragment thereof, e.g., wherein the effector moiety comprises an amino acid sequence of SEQ ID NO: 17 or a sequence with at least 80, 85, 90, 95, 99, or 100% identity thereto, or having no more than 20, 19, 18, 17, 16, 15, 14, 13, 12, 11, 10, 9, 8, 7, 6, 5, 4, 3, 2, or 1 positions of difference thereto.

16. The site-specific disrupting agent of any of claims 2-11, wherein the effector moiety is HDAC8, or a functional variant or fragment thereof, e.g., wherein the effector moiety comprises an amino acid sequence of SEQ ID NO: 19 or a sequence with at least 80, 85, 90, 95, 99, or 100% identity thereto, or having no more than 20, 19, 18, 17, 16, 15, 14, 13, 12, 11, 10, 9, 8, 7, 6, 5, 4, 3, 2, or 1 positions of difference thereto, wherein optionally the effector moiety is C-terminal of the targeting moiety.

17. The site-specific disrupting agent of any of claims 2-11, wherein the effector moiety is G9A, or a functional variant or fragment thereof, e.g., wherein the effector moiety comprises an amino acid sequence of SEQ ID NO: 67 or a sequence with at least 80, 85, 90, 95, 99, or 100% identity thereto, or having no more than 20, 19, 18, 17, 16, 15, 14, 13, 12, 11, 10, 9, 8, 7, 6, 5, 4, 3, 2, or 1 positions of difference thereto, wherein optionally the effector moiety is N-terminal of the targeting moiety.

18. The site-specific disrupting agent of any of claims 2-17, which further comprises a second effector moiety.

19. The site-specific disrupting agent of claim 18, wherein the targeting moiety is situated between the first effector moiety and the second effector moiety.

20. The site-specific disrupting agent of any of claims 2-19, wherein the effector moiety comprises a polymer e.g., an oligonucleotide; e.g., a gRNA.

21. The site-specific disrupting agent of claim 20, wherein the oligonucleotide has a sequence that comprises a complement of the anchor sequence or to a sequence proximal to the anchor sequence.

22. The site-specific disrupting agent of any of claims 2-21, wherein the targeting moiety further comprises a gRNA, e.g., a gRNA that binds a genomic locus comprising at least 14, 15, 16, 17, 18, 19, or 20 nucleotides of the sequence of any of SEQ ID NOs: 20-62, e.g., wherein the gRNA comprises a sequence that comprises at least 14, 15, 16, 17, 18, 19, or 20 nucleotides of the sequence of any of SEQ ID NOs: 20-62.

23. The site-specific disrupting agent of any of claims 2-22, wherein the targeting domain comprises a CRISPR/Cas molecule, e.g., a catalytically inactive CRISPR/Cas protein, and a gRNA, e.g., a gRNA that binds a genomic locus comprising at least 14, 15, 16, 17, 18, 19, or 20 nucleotides of the sequence of any of SEQ ID NOs: 20-62, e.g., wherein the gRNA comprises a sequence that comprises at least 14, 15, 16, 17, 18, 19, or 20 nucleotides of the sequence of any of SEQ ID NOs: 20-62 and the effector moiety comprises an effector chosen from DNMT3a/31, MQ1, KRAB, G9A, HDAC8, or EZH2.

24. The site-specific disrupting agent of claim 23, wherein the targeting domain comprises a CRISPR/Cas molecule, e.g., a catalytically inactive CRISPR/Cas protein, and a gRNA, e.g., a gRNA that binds a genomic locus comprising at least 14, 15, 16, 17, 18, 19, or 20 nucleotides of the sequence of any of SEQ ID NOs: 20-62, e.g., wherein the gRNA comprises a sequence that comprises at least 14, 15, 16, 17, 18, 19, or 20 nucleotides of the sequence of any of SEQ ID NOs: 20-62, the first effector moiety comprises an effector chosen from DNMT3a/31, MQ1, KRAB, G9A, HDAC8, or EZH2, and the second effector moiety comprises an effector chosen from DNMT3a/31, MQ1, KRAB, G9A, HDAC8, or EZH2.

25. The site-specific disrupting agent of any of claims 2-24, wherein the targeting domain binds a genomic locus comprising at least 14, 15, 16, 17, 18, 19, or 20 nucleotides of the sequence of any of SEQ ID NOs: 20-62.

26. The site-specific disrupting agent of any of claims 2-25, wherein the targeting domain binds a genomic locus that is within 50 nucleotides (e.g., upstream or downstream) of the sequence of any of SEQ ID NOs: 20-62.

27. The site-specific disrupting agent of any of claims 2-26, wherein the targeting domain binds a genomic locus that is within 100 nucleotides (e.g., upstream or downstream) of the sequence of any of SEQ ID NOs: 20-62.

28. The site-specific disrupting agent of any of claims 2-27, wherein the targeting domain binds a genomic locus that is within 200 (e.g., upstream or downstream) nucleotides of the sequence of any of SEQ ID NOs: 20-62.

29. The site-specific disrupting agent of any of claims 2-28, wherein the targeting domain binds a genomic locus that is within 300 nucleotides (e.g., upstream or downstream) of the sequence of any of SEQ ID NOs: 20-62.

30. The site-specific disrupting agent of any of claims 2-29, which: (i) comprises one or more nuclear localization signal sequences (NLS), or (ii) does not comprise an NLS, optionally wherein the NLS comprises an amino acid sequence of SEQ ID NO: 63 and/or 64.

31. The site-specific disrupting agent of any of claims 18-30, wherein the first and/or second effector moiety comprises a DNA methyltransferase, a histone methyltransferase, a histone deacetylase, a histone demethylase, or a recruiter of a histone modifying complex.

32. The site-specific disrupting agent of claim 2-31, wherein the ASMC comprises two loops.

33. The site-specific disrupting agent of any of claims 2-32 or the method of claim 1, wherein the first gene is situated in a first loop of the ASMC, and the second gene is situated in a second loop of the ASMC.

34. The site-specific disrupting agent or method of claim 33, wherein the first anchor sequence is situated between the first and second loops.

35. A nucleic acid encoding a site-specific disrupting agent of any of claims 2-34.

36. The method of claim 1 or site-specific disrupting agent of any of claims 2-36, wherein the anchor sequence-mediated conjunction further comprises a third gene, and optionally wherein the method results in decreased expression of the third gene.

37. The method or site-specific disrupting agent of claim 36, wherein the anchor sequence-mediated conjunction further comprises a fourth gene, and optionally wherein the method results in decreased expression of the fourth gene.

38. The method or site-specific disrupting agent of claim 37, wherein the anchor sequence-mediated conjunction further comprises a fifth gene, and optionally wherein the method results in decreased expression of the fifth gene.

39. The method or site-specific disrupting agent of claim 38, wherein the anchor sequence-mediated conjunction further comprises a sixth gene, and optionally wherein the method results in decreased expression of the sixth gene.

40. The method or site-specific disrupting agent of claim 39, wherein the anchor sequence-mediated conjunction further comprises a seventh gene, and optionally wherein the method results in decreased expression of the seventh gene.

41. The method or site-specific disrupting agent of claim 40, wherein the anchor sequence-mediated conjunction further comprises an eighth gene, and optionally wherein the method results in decreased expression of the eighth gene.

42. A human cell having decreased expression of a first gene and a second gene, wherein the first gene and the second gene are proinflammatory genes,
wherein the cell comprises a disrupted (e.g., fully disrupted) anchor sequence-mediated conjunction that comprises the first and second genes.

43. The human cell of claim 42, which has reduced CTCF binding to an anchor sequence that is comprised by the anchor sequence-mediated conjunction, e.g., reduced by at least 20, 30, 40, 50, 60, 70, 80, 90, or 100%.

44. The human cell of either of claim 42 or 43, wherein the human cell has decreased expression of a third proinflammatory gene.

45. The human cell of claim 44, wherein the human cell has decreased expression of a fourth proinflammatory gene.

46. The human cell of claim 45, wherein the human cell has decreased expression of a fifth proinflammatory gene.

47. The human cell of claim 46, wherein the human cell has decreased expression of a sixth proinflammatory gene.

48. The human cell of claim 47, wherein the human cell has decreased expression of a seventh proinflammatory gene.

49. The human cell of claim 48, wherein the human cell has decreased expression of an eighth proinflammatory gene.

50. The human cell of any of claims 42-49, wherein the human cell comprises a mutation at chr4:74595464-74595486, chr4:74595457-74595479, chr4:74595460-74595482, chr4:74595472-74595494, chr4:75000088-75000110, chr4:75000091-75000113, chr4:75000085-75000107, chr4:75000157-75000179, chr4:75000156-75000178, chr4:74595215-74595237, chr4:74595370-74595392, chr4:74595560-74595582, chr4:74595642-74595664, chr4:74595787-74595809, chr4:74528428-74528450, chr4:74528567-74528589, chr4:74528609-74528631, chr4:74789132-74789154, chr4:74789250-74789272, chr4:74789312-74789334, chr4:74964853-74964875, chr4:74964906-74964928, chr4:74965538-74965560, chr4:74965737-74965759, chr4:75000031-75000053, chr4:75000115-75000137, chr4:75000231-75000253, chr4:74975146-74975168, chr4:74975369-74975391, chr4:74976318-74976340, chr4:74570348-74570370, chr4:74570503-74570525, or chr4:74570526-74570548, or within 5, 10, 15, 20, 30, 40, or 50 nucleotides of said region.

51. A human cell comprising a mutation at chr4:74595464-74595486, chr4:74595457-74595479, chr4:74595460-74595482, chr4:74595472-74595494, chr4:75000088-75000110, chr4:75000091-75000113, chr4:75000085-75000107, chr4:75000157-75000179, chr4:75000156-75000178, chr4:74595215-74595237, chr4:74595370-74595392, chr4:74595560-74595582, chr4:74595642-74595664, chr4:74595787-74595809, chr4:74528428-74528450, chr4:74528567-74528589, chr4:74528609-74528631, chr4:74789132-74789154, chr4:74789250-74789272, chr4:74789312-74789334, chr4:74964853-74964875, chr4:74964906-74964928, chr4:74965538-74965560, chr4:74965737-74965759, chr4:75000031-75000053, chr4:75000115-75000137, chr4:75000231-75000253, chr4:74975146-74975168, chr4:74975369-74975391, chr4:74976318-74976340, chr4:74570348-74570370, chr4:74570503-74570525, or chr4:74570526-74570548, or within 5, 10, 15, 20, 30, 40, or 50 nucleotides of said region.

52. The human cell of either of claim 27 or 28, wherein the mutation comprises a deletion, substitution, or insertion (e.g., of 1-10, 1-9, 1-8, 1-7, 1-6, 1-5, 1-4, 1-3, or 1-2 nucleotides).

53. The human cell of any of claims 50-52, which has reduced CTCF binding to the mutation, e.g., reduced by at least 20, 30, 40, 50, 60, 70, 80, 90, or 100% compared to a human cell with an undisrupted ASMC.

54. The human cell of any of claims 42-53, wherein expression of the first and second genes is reduced by at least 10%, 20%, 30%, 40%, 50%, 60%, 70%, 80%, or 90% compared to a human cell with an undisrupted ASMC.

55. A system comprising:
a first site-specific disrupting agent comprising a first targeting moiety and optionally a first effector moiety, wherein the first site-specific disrupting agent binds specifically to a first anchor sequence of an anchor sequence mediated conjunction (ASMC), wherein the ASMC comprises a first gene and a second gene, and
a second site-specific disrupting agent comprising a second targeting moiety and optionally a second effector moiety, wherein the second site-specific disrupting agent binds to a second anchor sequence of the ASMC.

56. The system of claim 55, wherein the first anchor sequence is between IL-8 and RASSF6; between the IL-8 enhancer and RASSF6; between CXCL1 and CXCL4; between CXCL2 and EPGN; or between the E2 enhancer and EPGN.

57. The system of claim 55 or 56, wherein the second anchor sequence is between IL-8 and RASSF6; between the IL-8 enhancer and RASSF6; between CXCL1 and CXCL4; between CXCL2 and EPGN; or between the E2 enhancer and EPGN.

58. The system of any of claims 55-57, wherein the first anchor sequence is between the IL-8 enhancer and RASSF6 and the second anchor sequence is between CXCL1 and CXCL4.

59. The system of any of claims 55-58, wherein the first anchor sequence is between the IL-8 enhancer and RASSF6 and the second anchor sequence is between the E2 enhancer and EPGN.

60. The system of any of claims 55-59, wherein the first anchor sequence is between CXCL1 and CXCL4 and the second anchor sequence is between the E2 enhancer and EPGN.

61. The system of any of claims 55-60, wherein the first site-specific disrupting agent is a site-specific disrupting agent described herein, e.g., a site-specific disrupting agent of any of claims 2-9.

62. The system of any of claims 55-61, wherein the second site-specific disrupting agent is a site-specific disrupting agent described herein, e.g., a site-specific disrupting agent of any of claims 2-9.

63. The system of any of claims 55-62, wherein the first targeting moiety and the second targeting moiety each independent comprises a TAL effector molecule, a CRISPR/Cas molecule, a zinc finger domain, a tetR domain, a meganuclease, or an oligonucleotide.

64. The system of any of claims 55-63, wherein the first effector and the second effector each independently comprises an effector described herein, e.g., MQ1, EZH2, HDAC8, KRAB, G9A, or DNMT3a/31, or a functional variant or fragment of any thereof.

65. The system of any of claims 55-62, wherein the first effector and the second effector each independently comprises a protein chosen from SETDB1, SETDB2, EHMT2 (i.e., G9A), EHMT1 (i.e., GLP), SUV39H1, EZH2, EZH1, SUV39H2, SETD8, SUV420H1, SUV420H2, or a functional variant or fragment of any thereof.

66. The system of any of claims 55-65, wherein the first effector and the second effector each independently comprises a protein chosen from HDAC1, HDAC2, HDAC3, HDAC4, HDAC5, HDAC6, HDAC7, HDAC8, HDAC9, HDAC10, HDAC11, SIRT1, SIRT2, SIRT3, SIRT4, SIRT5, SIRT6, SIRT7, SIRT8, SIRT9, or a functional variant or fragment of any thereof.

67. The system of any of claims 55-43, wherein the first effector and the second effector each independently comprises a protein chosen from MQ1, DNMT1, DNMT3A1, DNMT3A2, DNMT3B1, DNMT3B2, DNMT3B3, DNMT3B4, DNMT3B5, DNMT3B6, DNMT3L, DNMT3a/31, or a functional variant or fragment of any thereof.

68. The system of any of claims 55-67, wherein the first effector and the second effector each independently comprises a protein chosen from KRAB, MeCP2, HP1, RBBP4, REST, FOG1, SUZ12, or a functional variant or fragment of any thereof.

69. The system of any of claims 55-68, wherein the first effector and the second effector each independently comprises a polymer e.g., an oligonucleotide.

70. The system of any of claims 55-69, wherein the first oligonucleotide and the second oligonucleotide are identical.

71. The system of any of claims 55-70, wherein the first oligonucleotide and the second oligonucleotide are different.

72. The system of any of claims 55-71, wherein the first oligonucleotide has a sequence that comprises a complement of the first anchor sequence or to a sequence proximal to the first anchor sequence and the second oligonucleotide has a sequence that comprises a complement of the second anchor sequence or to a sequence proximal to the second anchor sequence.

73. The system of any of claims 55-72, wherein the anchor sequence-mediated conjunction further comprises a third gene.

74. The system of any of claims 55-73, wherein the anchor sequence-mediated conjunction further comprises a fourth gene.

75. The system of any of claims 55-74, wherein the anchor sequence-mediated conjunction further comprises a fifth gene.

76. The system of any of claims 55-75, wherein the anchor sequence-mediated conjunction further comprises a sixth gene.

77. The system of any of claims 55-76, wherein the anchor sequence-mediated conjunction further comprises a seventh gene.

78. The system of any of claims 55-77, wherein the anchor sequence-mediated conjunction further comprises an eighth gene.

79. The system of any of claims 55-78, wherein the ASMC comprises two loops.

80. A nucleic acid composition encoding the system of any of claims 55-79.

81. The nucleic acid of claim 80, wherein a single nucleic acid encodes both of the first site-specific disrupting agent and the second site-specific disrupting agent.

82. The nucleic acid of claim 81, wherein a first nucleic acid encodes the first site-specific disrupting agent and a second nucleic acid encodes the second site-specific disrupting agent.

83. A method of decreasing expression of a first gene and a second gene in a cell, comprising contacting the cell with a system according to any of claims 55-79 of a nucleic acid composition according to any of claims 80-82.

84. The method of claim 83, wherein the cell is simultaneously contacted with the first site-specific disrupting agent and the second site-specific disrupting agent.

85. The method of claim 83, wherein the cell is sequentially contacted with the first site-specific disrupting agent and the second site-specific disrupting agent.

86. The method, human cell, site-specific disrupting agent, or system of any of claims 1-85, wherein the first gene is CXCL1 and the second gene is CXCL2.

87. The method, human cell, site-specific disrupting agent, or system of any of claims 1-85, wherein the first gene is CXCL1 and the second gene is CXCL3.

88. The method, human cell, site-specific disrupting agent, or system of any of claims 1-85, wherein the first gene is CXCL1 and the second gene is IL-8.

89. The method, human cell, site-specific disrupting agent, or system of any of claims 1-85, wherein the first gene is CXCL1 and the second gene is CXCL4.

90. The method, human cell, site-specific disrupting agent, or system of any of claims 1-85, wherein the first gene is CXCL1 and the second gene is CXCL5.

91. The method, human cell, site-specific disrupting agent, or system of any of claims 1-85, wherein the first gene is CXCL1 and the second gene is CXCL6.

92. The method, human cell, site-specific disrupting agent, or system of any of claims 1-85, wherein the first gene is CXCL1 and the second gene is CXCL7.

93. The method, human cell, site-specific disrupting agent, or system of any of claims 1-85, wherein the first gene is CXCL2 and the second gene is CXCL3.

94. The method, human cell, site-specific disrupting agent, or system of any of claims 1-85, wherein the first gene is CXCL2 and the second gene is IL-8.

95. The method, human cell, site-specific disrupting agent, or system of any of claims 1-85, wherein the first gene is CXCL2 and the second gene is CXCL4.

96. The method, human cell, site-specific disrupting agent, or system of any of claims 1-85, wherein the first gene is CXCL2 and the second gene is CXCL4.

97. The method, human cell, site-specific disrupting agent, or system of any of claims 1-85, wherein the first gene is CXCL2 and the second gene is CXCL5.

98. The method, human cell, site-specific disrupting agent, or system of any of claims 1-85, wherein the first gene is CXCL2 and the second gene is CXCL6.

99. The method, human cell, site-specific disrupting agent, or system of any of claims 1-85, wherein the first gene is CXCL2 and the second gene is CXCL7.

100. The method, human cell, site-specific disrupting agent, or system of any of claims 1-85, wherein the first gene is CXCL3 and the second gene is IL-8.

101. The method, human cell, site-specific disrupting agent, or system of any of claims 1-85, wherein the first gene is CXCL3 and the second gene is CXCL4.

102. The method, human cell, site-specific disrupting agent, or system of any of claims 1-85, wherein the first gene is CXCL3 and the second gene is CXCL5.

103. The method, human cell, site-specific disrupting agent, or system of any of claims 1-85, wherein the first gene is CXCL3 and the second gene is CXCL6.

104. The method, human cell, site-specific disrupting agent, or system of any of claims 1-85, wherein the first gene is CXCL3 and the second gene is CXCL7.

105. The method, human cell, site-specific disrupting agent, or system of any of claims 1-85, wherein the first gene is CXCL4 and the second gene is CXCL5.

106. The method, human cell, site-specific disrupting agent, or system of any of claims 1-85, wherein the first gene is CXCL4 and the second gene is CXCL6.

107. The method, human cell, site-specific disrupting agent, or system of any of claims 1-85, wherein the first gene is CXCL4 and the second gene is CXCL7.

108. The method, human cell, site-specific disrupting agent, or system of any of claims 1-85, wherein the first gene is CXCL4 and the second gene is IL-8.

109. The method, human cell, site-specific disrupting agent, or system of any of claims 1-85, wherein the first gene is CXCL5 and the second gene is CXCL6.

110. The method, human cell, site-specific disrupting agent, or system of any of claims 1-85, wherein the first gene is CXCL5 and the second gene is CXCL7.

111. The method, human cell, site-specific disrupting agent, or system of any of claims 1-85, wherein the first gene is CXCL5 and the second gene is IL-8.

112. The method, human cell, site-specific disrupting agent, or system of any of claims 1-85, wherein the first gene is CXCL6 and the second gene is CXCL7.

113. The method, human cell, site-specific disrupting agent, or system of any of claims 1-85, wherein the first gene is CXCL6 and the second gene is IL-8.

114. The method, human cell, site-specific disrupting agent, or system of any of claims 1-85, wherein the first gene is CXCL7 and the second gene is IL-8.

115. The method, human cell, site-specific disrupting agent, or system of any of claims 36-85, wherein the first gene is CXCL1, the second gene is CXCL2, and the third gene is CXCL3.

116. The method, human cell, site-specific disrupting agent, or system of any of claims 36-85, wherein the first, second, and third genes are chosen from CXCL1, CXCL2, CXCL3, CXCL4, CXCL5, CXCL6, CXCL7, or IL-8.

117. The method, human cell, site-specific disrupting agent, or system of any of claims 36-85, wherein the first, second, third, and fourth genes are chosen from CXCL1, CXCL2, CXCL3, CXCL4, CXCL5, CXCL6, CXCL7, or IL-8.

118. The method, human cell, site-specific disrupting agent, or system of any of claims 36-85, wherein the first, second, third, fourth, and fifth genes are chosen from CXCL1, CXCL2, CXCL3, CXCL4, CXCL5, CXCL6, CXCL7, or IL-8.

119. The method, human cell, site-specific disrupting agent, or system of any of claims 36-85, wherein the first, second, third, fourth, fifth, and sixth genes are chosen from CXCL1, CXCL2, CXCL3, CXCL4, CXCL5, CXCL6, CXCL7, or IL-8.

120. The method, human cell, site-specific disrupting agent, or system of any of claims 36-85, wherein the first, second, third, fourth, fifth, sixth, and seventh genes are chosen from CXCL1, CXCL2, CXCL3, CXCL4, CXCL5, CXCL6, CXCL7, or IL-8.

121. The method, human cell, site-specific disrupting agent, or system of any of claims 36-85, wherein the first, second, third, fourth, fifth, sixth, seventh, and eighth genes are CXCL1, CXCL2, CXCL3, CXCL4, CXCL5, CXCL6, CXCL7, or IL-8.

122. The method, human cell, site-specific disrupting agent, or system of any of the preceding claims, wherein the first gene is a cytokine.

123. The method, human cell, site-specific disrupting agent, or system of any of the preceding claims, wherein the second gene is a cytokine.

124. The method, human cell, site-specific disrupting agent, or system of any of the preceding claims, wherein the third gene is a cytokine.

125. The method, human cell, site-specific disrupting agent, or system of any of the preceding claims, wherein the fourth gene is a cytokine.

126. The method, human cell, site-specific disrupting agent, or system of any of the preceding claims, wherein the fifth gene is a cytokine.

127. The method, human cell, site-specific disrupting agent, or system of any of the preceding claims, wherein the sixth gene is a cytokine.

128. The method, human cell, site-specific disrupting agent, or system of any of the preceding claims, wherein the seventh gene is a cytokine.

129. The method, human cell, site-specific disrupting agent, or system of any of the preceding claims, wherein the eighth gene is a cytokine.

130. The method, human cell, site-specific disrupting agent, or system of any of the preceding claims, wherein the anchor sequence-mediated conjunction comprises 3, 4, or 5 proinflammatory genes.

131. The method, site-specific disrupting agent, or system of any of the preceding claims, wherein the site-specific disrupting agent comprises a nucleic acid (e.g., DNA or RNA) comprising a nucleotide sequence chosen from SEQ ID NOs: 20-62, or a sequence having at least 90%, 95%, 98%, or 99% identity thereto, or differing at no more than 1, 2, 3, 4, or 5 positions relative thereto.

132. The method, site-specific disrupting agent of any of the preceding claims, wherein the site-specific disrupting agent comprises a nucleic acid (e.g., DNA or RNA) comprising a nucleotide sequence chosen from SEQ ID NOs: 21, 22, 24, 40, or a sequence having at least 90%, 95%, 98%, or 99% identity thereto, or differing at no more than 1, 2, 3, 4, or 5 positions relative thereto.

133. The method or site-specific disrupting agent of any of the preceding claims, wherein the site-specific disrupting agent binds to a sequence at least partially overlapping with the region having genomic coordinates chosen from Table 4 5, 6, 7, or a sequence that is within 5, 10, 15, 20, 30, 40, 50, 100, 200, 300, 400, 500, 600, 700, 800, 900, or 1000 nucleotides of said region.

134. The method of any of the preceding claims, which results in a decrease in a level of a cytokine, e.g., a chemokine, e.g., upon stimulation of the cell with TNF-alpha, e.g., measured as described in Examples 2-11.

135. The method or human cell of any of the preceding claims, wherein a level of a cytokine (e.g., a chemokine) is decreased, e.g., upon stimulation of the cell with TNF-alpha, e.g., measured as described in Examples 2-11.

136. The method or human cell of any of the preceding claims, wherein the transcript level of one or more of (e.g., 2, 3, or all of) CXCL1, CXCL2, CXCL3, and IL8 is decreased, e.g., upon stimulation of the cell with TNF-alpha, e.g., measured as described in Examples 2 or 4-11.

137. The method or human cell of any of the preceding claims, wherein the transcript level of one or more of (e.g., 2, 3, or all of) CXCL1, CXCL2, CXCL3, CXCL4, CXCL5, CXCL6, CXCL7, and IL8 is decreased, e.g., upon stimulation of the cell with TNF-alpha.

138. The method or human cell of any of claims 132-137, wherein the decrease is a decrease of at least 10%, 20%, 30%, 40%, 50%, 60%, 70%, 80%, or 90% compared to pre-treatment levels or to a human cell with an undisrupted ASMC.

139. The method or human cell of any of the preceding claims, wherein the protein level (e.g., secreted protein level) of one or more of (e.g., 2, 3, or all of) of CXCL1, CXCL2, CXCL3, and IL8 is decreased, e.g., upon stimulation of the cell with TNF-alpha, e.g., measured as described Example 3.

140. The method or human cell of any of the preceding claims, wherein the protein level (e.g., secreted protein level) of one or more of (e.g., 2, 3, or all of) CXCL1, CXCL2, CXCL3, CXCL4, CXCL5, CXCL6, CXCL7, and IL8 is decreased, e.g., upon stimulation of the cell with TNF-alpha.

141. The method or human cell of claim 140, wherein the decrease is a decrease of at least 10%, 20%, 30%, 40%, 50%, 60%, 70%, 80%, or 90% compared to pre-treatment levels or to a human cell with an undisrupted ASMC.

142. The method of any of the preceding claims, which results in decrease in binding of CTCF to the first anchor sequence, e.g., a complete loss of binding or a loss of at least 20, 30, 40, 50, 60, 70, 80, 90, or 100% compared to a human cell with an undisrupted ASMC, e.g., as measured by ChIP and quantitative PCR.

143. The method of any of the preceding claims, which results in disruption of the anchor sequence-mediated conjunction.

144. The method of any of the preceding claims, wherein a population of the cells is contacted with the site-specific disrupting agent, and wherein the first anchor sequence is edited in at least 50%, 60%, 70%, 80%, 90%, or 95% of cells in the population.

145. The method of any of the preceding claims, wherein the effect (e.g., the decrease in cytokine levels) is additive or synergistic compared to the effect of inhibiting the first gene or the second gene individually.

146. The method of any of the preceding claims, wherein expression is decreased for at least 1, 2, 3, 4, 5, 6, 7, 10, or 14 days, or at least 1, 2, 3, 4, or 5 weeks.

147. The method, human cell, site-specific disrupting agent, or system of any of the preceding claims, wherein the cell is a cell of a subject having an inflammatory disease, e.g., an immune mediated inflammatory disease.

148. The method, human cell, site-specific disrupting agent, or system of any of the preceding claims, wherein the inflammatory disease is an autoimmune disorder, e.g., rheumatoid arthritis.

149. The method, human cell, site-specific disrupting agent, or system of any of the preceding claims, wherein the inflammatory disease is associated with a pathogenic infection, e.g., viral infection, e.g., SARS-CoV2 infection.

150. The method, human cell, site-specific disrupting agent, or system of any of the preceding claims, wherein the inflammatory disease is associated with a superinfection, e.g., infection caused by two or more pathogenic agents, e.g., by a virus and a bacterium, (e.g., by SARS-CoV2 and Streptococcus pneumoniae), e.g., by a virus and a fungus, (e.g., by SARS-CoV2 and mucormycosis).

151. The method, human cell, site-specific disrupting agent, or system of any of the preceding claims, wherein the cell is a cell of a subject having rheumatoid arthritis, inflammatory, arthritis, gout, asthma, neutrophilic asthma, neutrophilic dermatosis, paw edema, acute respiratory disease syndrome (ARDS), COVID-19, psoriasis, inflammatory bowel disease, infection (e.g., by a pathogen, e.g., a bacteria, a viruses, or a fungus), external injury (e.g., scrapes or foreign objects), effects of radiation or chemical injury, osteoarthritis, osteoarthritic joint pain, joint pain, inflammatory pain, acute pain, chronic pain, cystisis, bronchitis, dermatitis, dermatosis, cardiovascular disease, neurodegenerative disease, liver disease, lung disease, kidney disease, pain, swelling, stiffness, tenderness, redness, warmth, or elevated biomarkers related to disease states (e.g., cytokines, chemokines, growth factors, immune receptors, infection markers, or inflammatory markers).

152. The method, human cell, site-specific disrupting agent, or system of any of the preceding claims, wherein the cell is a cell of a subject having rheumatoid arthritis, psoriasis, or inflammatory bowel disease.

153. The method, human cell, site-specific disrupting agent, or system of any of the preceding claims, wherein the cell is a cell of a subject having rheumatoid arthritis, gout, neutrophilic asthma, neutrophilic dermatosis, acute respiratory disease syndrome (ARDS), or COVID-19.

154. The method, site-specific disrupting agent, or system of any of the preceding claims, wherein the anchor sequence-mediated conjunction comprises an internal enhancing sequence.

155. The method, site-specific disrupting agent, or system of any of the preceding claims, wherein the second gene (and optionally the third, fourth, fifth, sixth, seventh, or eighth genes) is transcribed in the same direction as the first gene.

156. The method, site-specific disrupting agent, or system of any of the preceding claims, wherein the first anchor sequence comprises a binding motif selected from a CTCF binding motif, USF1 binding motif, YY1 binding motif, TAF3 binding motif, or ZNF143 binding motif.

157. The method, site-specific disrupting agent, or system of any of the preceding claims, wherein the first anchor sequence comprises a CTCF binding motif.

158. The method, site-specific disrupting agent, or system of any of the preceding claims, wherein the site-specific disrupting agent binds specifically to or proximal to the first anchor sequence with sufficient affinity that it competes with binding of an endogenous nucleating polypeptide (e.g., CTCF, USF1, YY1, TAF3, or ZNF143) within the cell.

159. The method, site-specific disrupting agent, or system of any of the preceding claims, wherein the site-specific disrupting agent adds, deletes, or substitutes one or more nucleotides within or proximal to the first anchor sequence.

160. The method or site-specific disrupting agent of any of the preceding claims, wherein the site-specific disrupting agent comprises a targeting moiety or effector moiety comprising a first CRISPR/Cas molecule comprising a first CRISPR/Cas protein and first guide RNA.

161. The method or system of any of the preceding claims, wherein the first site-specific disrupting agent comprises a first targeting moiety or first effector moiety comprising a first CRISPR/Cas molecule comprising a first CRISPR/Cas protein and first guide RNA and the second site-specific disrupting agent comprises a second targeting moiety or second effector moiety comprising a second CRISPR/Cas molecule comprising a second CRISPR/Cas protein and second guide RNA.

162. The method or site-specific disrupting agent of any of the preceding claims, wherein the site-specific disrupting agent comprises a targeting moiety or effector moiety comprising TAL effector molecule, a CRISPR/Cas molecule, a zinc finger domain, a tetR domain, a meganuclease, or an oligonucleotide.

163. The method or system of any of the preceding claims, wherein the first site-specific disrupting agent comprises a first targeting moiety or first effector moiety comprising TAL effector molecule, a CRISPR/Cas molecule, a zinc finger domain, a tetR domain, a meganuclease, or an oligonucleotide and the second site-specific disrupting agent comprises a second targeting moiety or second effector moiety comprising TAL effector molecule, a CRISPR/Cas molecule, a zinc finger domain, a tetR domain, a meganuclease, or an oligonucleotide.

164. The method or site-specific disrupting agent of any of the preceding claims, wherein the site-specific disrupting agent comprises an effector moiety comprising a histone modifying functionality, e.g., a histone methyltransferase, histone demethylase, or histone deacetylase activity.

165. The method or system of any of the preceding claims, wherein the first and/or the second site-specific disrupting agent comprises an effector moiety comprising a histone modifying functionality, e.g., a histone methyltransferase, histone demethylase, or histone deacetylase activity.

166. The method, site-specific disrupting agent, or system of claim 164 or 165, wherein the effector moiety comprises a protein chosen from SETDB1, SETDB2, EHMT2 (i.e., G9A), EHMT1 (i.e., GLP), SUV39H1, EZH2, EZH1, SUV39H2, SETD8, SUV420H1, SUV420H2, or a functional variant or fragment of any thereof.

167. The method, site-specific disrupting agent, or system of claim 164 or 165, wherein the effector moiety comprises a protein chosen from HDAC1, HDAC2, HDAC3, HDAC4, HDAC5, HDAC6, HDAC7, HDAC8, HDAC9, HDAC10, HDAC11, SIRT1, SIRT2, SIRT3, SIRT4, SIRT5, SIRT6, SIRT7, SIRT8, SIRT9, or a functional variant or fragment of any thereof.

168. The method, site-specific disrupting agent, or system of claim 164 or 165, wherein the effector moiety comprises EZH2 or a functional variant or fragment of any thereof.

169. The method, site-specific disrupting agent, or system of claim 164 or 165, wherein the effector moiety comprises HDAC8 or a functional variant or fragment of any thereof.

170. The method or site-specific disrupting agent of any of the preceding claims, wherein the site-specific disrupting agent comprises an effector moiety comprising a DNA modifying functionality, e.g., a DNA methyltransferase.

171. The method or system of any of the preceding claims, wherein the first and/or the second site-specific disrupting agent comprises an effector moiety comprising a DNA modifying functionality, e.g., a DNA methyltransferase.

172. The method, site-specific disrupting agent, or system of claim 170 or 171, wherein the effector moiety comprises a protein chosen from MQ1, DNMT1, DNMT3A1, DNMT3A2, DNMT3B1, DNMT3B2, DNMT3B3, DNMT3B4, DNMT3B5, DNMT3B6, DNMT3L, DNMT3a/31, or a functional variant or fragment of any thereof.

173. The method, site-specific disrupting agent, or system of claim 170 or 171, wherein the effector moiety comprises MQ1 or a functional variant or fragment of any thereof.

174. The method, site-specific disrupting agent, or system of claim 170 or 171, wherein the effector moiety comprises DNMT3 (e.g., DNMT3a, DNMT3L, DNMT3a/31, DNMT3B1, DNMT3B2, DNMT3B3, DNMT3B4, DNMT3B5, or DNMT3B6) or a functional variant or fragment of any thereof.

175. The method or site-specific disrupting agent of any of the preceding claims, wherein the site-specific disrupting agent comprises an effector moiety comprising a transcriptional repressor.

176. The method or site-specific disrupting agent of any of the preceding claims, wherein the first and/or the second site-specific disrupting agent comprises an effector moiety comprising a transcriptional repressor.

177. The method, site-specific disrupting agent, or system of claim 175 or 176, wherein the effector moiety comprises a protein chosen from KRAB, MeCP2, HP1, RBBP4, REST, FOG1, SUZ12, or a functional variant or fragment of any thereof.

178. The method, site-specific disrupting agent, or system of claim 177, wherein the effector moiety comprises KRAB or a functional variant or fragment of any thereof.

179. The method or site-specific disrupting agent of any of the preceding claims, wherein the site-specific disrupting agent comprises a polymer.

180. The method or system of any of the preceding claims, wherein the first and/or the second site-specific disrupting agent comprises a polymer.

181. The method, site-specific disrupting agent, or system of claim 179 or 180, wherein the polymer comprises a polyamide.

182. The method, site-specific disrupting agent, or system of claim 179 or 180, wherein the polymer is an oligonucleotide.

183. The method, site-specific disrupting agent, or system of claim 182, wherein the oligonucleotide has a sequence that comprises a complement of the first anchor sequence or to a sequence proximal to the first anchor sequence.

184. The method, site-specific disrupting agent, or system of claim 182, wherein the oligonucleotide has a sequence that comprises a complement of the second anchor sequence or to a sequence proximal to the second anchor sequence.

185. The method, site-specific disrupting agent, or system of any of claims 182-184, wherein the oligonucleotide comprises a chemical modification.

186. The method or site-specific disrupting agent, or system of claim 179 or 180, wherein the polymer is a peptide nucleic acid.

187. The method, site-specific disrupting agent, or system of any preceding claim, wherein the site-specific disrupting agent comprises a peptide-nucleic acid mixmer.

188. The method, site-specific disrupting agent, or system of any preceding claim wherein the site-specific disrupting agent (e.g., a targeting moiety or effector moiety of the site-specific disrupting agent) comprises a peptide or polypeptide.

189. The method, site-specific disrupting agent, or system of claim 188, wherein the polypeptide is a zinc finger polypeptide.

190. The method, site-specific disrupting agent, or system of claim 188, wherein the polypeptide is or comprises a Transcription activator-like effector nuclease (TALEN) polypeptide.

191. The method or site-specific disrupting agent of any preceding claim, wherein the site-specific disrupting agent comprises a small molecule.

192. The method or system of any preceding claim, wherein the first and/or the second site-specific disrupting agent comprises a small molecule.

193. The method or site-specific disrupting agent of any of the preceding claims, wherein the site-specific disrupting agent further comprises an effector moiety, e.g., an epigenetic modifying agent, e.g., a DNA methyltransferase, histone deacetylase, or a histone methyltransferase.

194. The method or system of any preceding claim, wherein the first and/or the second site-specific disrupting agent further comprises an effector moiety, e.g., an epigenetic modifying agent, e.g., a DNA methyltransferase, histone deacetylase, or a histone methyltransferase.

195. The method or site-specific disrupting agent of any of the preceding claims, wherein the site-specific disrupting agent comprises a fusion molecule.

196. The method or system of any preceding claims, wherein the first and/or the second site-specific disrupting agent comprises a fusion molecule.

197. The method or site-specific disrupting agent of any preceding claims wherein the site-specific disrupting agent comprises a targeting moiety comprising a CRISPR/Cas molecule and an effector moiety comprising a transcriptional repressor, e.g., as a fusion molecule.

198. The method or system of any preceding claim, wherein the first and/or the second site-specific disrupting agent comprises a targeting moiety comprising a CRISPR/Cas molecule and an effector moiety comprising a transcriptional repressor, e.g., as a fusion molecule.

199. The method or site-specific disrupting agent of claim 198, wherein the targeting moiety comprises dCas9 and the effector moiety KRAB or a functional variant or portion thereof.

200. The method or system of any preceding claim, wherein the first and/or the second targeting moiety comprises dCas9 and the effector moiety KRAB or a functional variant or portion thereof.

201. The method or site-specific disrupting agent of any claims 1-177, wherein the site-specific disrupting agent comprises a targeting moiety comprising a CRISPR/Cas molecule and an effector moiety comprising a histone methyltransferase, e.g., as a fusion molecule.

202. The method or system of any preceding claim, wherein the first and/or the second site-specific disrupting agent comprises a targeting moiety comprising a CRISPR/Cas molecule and an effector moiety comprising a histone methyltransferase, e.g., as a fusion molecule.

203. The method, site-specific disrupting agent, or system of claim 201, wherein the targeting moiety comprises dCas9 and the effector moiety comprises EZH2 or a functional variant or portion thereof.

204. The method, site-specific disrupting agent, or system of any of claims 1-196, wherein the site-specific disrupting agent comprises a targeting moiety comprising a CRISPR/Cas molecule and an effector moiety comprising a DNA methyltransferase, e.g., as a fusion molecule.

205. The method, site-specific disrupting agent, or system of claim 204, wherein the targeting moiety comprises dCas9 and the effector moiety comprises MQ1 or a functional variant or portion thereof.

206. The method, site-specific disrupting agent, or system of claim 203, wherein the targeting moiety comprises dCas9 and the effector moiety comprises DNMT3, e.g., DNMT3a/31 or a functional variant or portion thereof.

207. The method, site-specific disrupting agent, or system of any of the preceding claims, wherein the site-specific disrupting agent comprises a targeting moiety comprising a CRISPR/Cas molecule, a first effector moiety comprising a histone methyltransferase, and a second effector moiety comprising a transcriptional repressor, e.g., as a fusion molecule.

208. The method, site-specific disrupting agent, or system of claim 207, wherein the targeting moiety comprises dCas9, the first effector moiety comprises EZH2 or a functional variant or portion thereof, and the second effector moiety comprises KRAB or a functional variant or portion thereof.

209. The method, site-specific disrupting agent, or system of any of the preceding claims, wherein the site-specific disrupting agent comprises a targeting moiety comprising a CRISPR/Cas molecule, and an effector moiety comprising a histone deacetylase, e.g., as a fusion molecule.

210. The method, site-specific disrupting agent, or system of claim 209, wherein the targeting moiety comprises dCas9 and the effector moiety comprises HDAC8 or a functional variant or portion thereof.

211. The method, site-specific disrupting agent, or system of any of the preceding claims, wherein the site-specific disrupting agent comprises a targeting moiety comprising a CRISPR/Cas molecule, a first effector moiety comprising a histone methyltransferase, and a second effector moiety comprising a histone deacetylase, e.g., as a fusion molecule.

212. The method, site-specific disrupting agent, or system of claim 211, wherein the targeting moiety comprises dCas9, the first effector moiety comprises EZH2 or a functional variant or portion thereof, and the second effector moiety comprises HDAC8 or a functional variant or portion thereof.

213. The method, site-specific disrupting agent, or system of any of claims 195-212, wherein the site-specific disrupting agent comprises an amino acid sequence encoded by a nucleic acid sequence chosen from SEQ ID NOs: 69, 71, 85, 201, 202, 204, 205, 207, 209, 211, 213, 215, 217, or 219-242, a complementary or reverse complementary sequence of any thereof, or comprises a sequence with at least 80, 85, 90, 91, 92, 93, 94, 95, 96, 97, 98, or 99% identity to any thereof.

214. The method, site-specific disrupting agent, or system of any of claims 195-213, wherein the site-specific disrupting agent comprises an amino acid sequence chosen from any one of SEQ ID NOs:70, 72, 82, 84, 86, 203, 206, 208, 210, 212, 214, 216, or 218, or encoded by a sequence chosen from any one of SEQ ID NOs: 219-242, or comprises a sequence with at least 80, 85, 90, 91, 92, 93, 94, 95, 96, 97, 98, or 99% identity to any thereof.

215. The method, site-specific disrupting agent, or system of any of the preceding claims, wherein the cell is situated in a subject.

216. The method, site-specific disrupting agent of any of claims 1-215, wherein the cell is ex vivo.

217. The method or site-specific disrupting agent, or system of any of the preceding claims, wherein the cell is a mammalian cell, e.g., a human cell.

218. The method, site-specific disrupting agent, or system of any of the preceding claims, wherein the cell is a somatic cell.

219. The method, site-specific disrupting agent, or system of any of the preceding claims, wherein the cell is a primary cell.

220. The method of any of the preceding claims, wherein the step of contacting is performed ex vivo.

221. The method of claim 220, further comprising, prior to the step of contacting, a step of removing the cell (e.g., mammalian cell) from a subject.

222. The method of either of claim 220 or 221, wherein further comprising, after the step of contacting, a step of (b) administering the cells (e.g., mammalian cells) to a subject.

223. The method of any of claims 1-222, wherein the step of contacting comprises administering a composition comprising the site-specific disrupting agent to a subject.

224. The method of claim 223, wherein the site-specific disrupting agent is administered as a monotherapy.

225. The method of claim 223, wherein the site-specific disrupting agent is administered in combination with a second therapeutic agent.

226. A reaction mixture comprising a cell (e.g., a human cell, e.g., a primary human cell) and a site-specific disrupting agent, or system of any of preceding claims.

227. A method of treating a subject having an inflammatory disorder, comprising:
administering to the subject a site-specific disrupting agent, system or reaction mixture of any preceding claims in an amount sufficient to treat the inflammatory disorder,
thereby treating the inflammatory disorder.

228. The method of claim 227, wherein the inflammatory disorder is rheumatoid arthritis, psoriasis, or inflammatory bowel disease.

229. The method of claim 227 or 228, wherein the inflammatory disorder is rheumatoid arthritis, gout, neutrophilic asthma, neutrophilic dermatosis, acute respiratory disease syndrome (ARDS), or COVID-19.

230. The method of any of claims 227-229, wherein the inflammatory disorder is an autoimmune disorder, e.g., rheumatoid arthritis.

231. The method of any of claims 227-229, wherein the inflammatory disease is associated with a pathogenic infection, e.g., viral infection, e.g., SARS-CoV2 infection.

232. The method of any of claims 227-229, wherein the inflammatory disease is associated with a superinfection, e.g., infection caused by two or more pathogenic agents, e.g., by a virus and a bacterium, (e.g., by SARS-CoV2 and Streptococcus pneumoniae), e.g., by a virus and a fungus, (e.g., by SARS-CoV2 and mucormycosis).
